United States Patent Application Publication US 2026/0265781 A1 - sequence listing, part 21

SEQ ID NO: 118 - DNA, 18231092 bp, synthetic construct (residues 16,205,417-18,231,092 of 18,231,092)
  source 1..18231092: mol_type = other DNA; note = Hot spot 2 - Chr 3 contig ref|NW_020822577.1 from Cricetulus griseus
cacagaagggcaggctaaacaccgatgtaacctggacaatagccatgcctaggccaattcccagcgacccagatgccaagcggacacaagctgccctacccatgatgactgaatatcttagagggttgcagatggccacataacggtcatatcccatgaccatgagtaggaaacaattgttgatgccaaaagttagataaaagaagatctggacaacacagtcttggaaagcaattgtgtggtaaggattgagaaggtcagaaagcatccgtggtatgatggtcacagtatagcaagtgtcagagatggacaatatggccaggaagaagtacatgggagtatggaggtgatggtccaggtgaataatagtcacgatgatcacgttgccagacagagtcagaaagtacaatgttagaaaaacagcaaaaagggaaagcctgtgctgccaattgaagctggagaaaccttcaaagaggaactctgtgacaaaggttgcatttgactttaacattgagaatactgtatttcaggaagtcagacaaaggagagaaaatcggtagtgagtcaaacacaaactgaacaggagtcggctggatcaaggccttcagagaacaatatgtctaccctgggcaaggctggggatgccagagtctcaagactcagctactggagaaatgctcagtcttcctctttgagctacctttcctctgggacttaaactaggcccatgggattgagaacacagatggagacaagaaaccaaatagatcaaaattaaaagagatttgtagaaatagtctagcttcagtttcttgatcatgtgattattgagtcacgtgttagtccccctttaacttttatgtaatttcctccaccaatttcaacagcgattgtgctaggtttctattccattaacagtgcacaaggttttcattcactcaaatattttctaacacttgtatatattaatatttgtttactattttcacaaattcataaaaacttataatttattttatatacaccttaacttttaggatgtggcatctaattgtatattttaattctattttttaaataattagtgatgtcaactaactttttgtttgcttacttaaattcaaccatgaccctaaaatgttatctttactttcatgtttaatataaagccatacacaatagctaacttacagaaacaacatggcagtctgtagacaaaaaatgactaaagaaaactgacatttgaaacaggttgctgttggtacacatctttaatcccagcacttgggagccagaggcaggctaatatctgagttccagaacagccaggtctacacagagaaaccctgtctgaaaaaaaaaaaaacacaatacccaatcccccaccaaaccacaaaacaattggcatttatgtaatatggtgtagttcattctgaaaggaaggaattctgaaagttgcagcaatgaggagtcatctagagcttatcatgaaagccaaataagcaagacaagaggtgaacaatttttgggtgttacttaaaatattcaaaataacatagattaaatttgcattatcagtaattatcagtagctggagaaggggaatggggaattgtttaaaaactaaaacatttcagcatgtaatatgaattacttcttaagattttctatatagcataatggctatgttaataacatggtactataaattttaagcattttgagagggtagaacacacaataaagtatcaagagtctctagggaatgtttgaagctctgtttttcatatttgtggtgtccacacttaactgctatatttgttcatactcatggtatattgcatagcaaggatgctccaggataattgccttaagaaataaagaaacagtgccagcaaaatgacccagtgatgaaattccaagtctgaagacttggtcccagtacccacatagtggaactcccagaagttgtcctttggtatctacatggataccatcatgttcatgtatgcattgtacatggacacacatacacacacacacacacacacacacacacacacacacacacacacacacgtaaaaatgagataactgtttctaaataaacaactgtttgaccactagagaaatggggctaggtcaaaagcaagtatgacattgaatgtgataagctgtatttagacacccacagctaaaccttgaactgaactgaaatccagttgcagagaagggtgactgatgagcaaaggggtccataccaggctggtgaaacccacagaaaagctgacctgtacaagggagagctcttggttcccagactcatagctgggaaaccagtatgggactgatccagacctcctgaatgtgggtgtcagtgaggagaccttggaaatctatggtgccccttgtagtgatcagtacttatccctagcataggaatggactttgggagcccatcctacatggaggcatactccctgagcctagacacaagggggttggcctaggccttaacccaaaggatatgacagactctgaagacctggtatggaaggcctcatcctccctggggagaagcaagagtatgggatatgtagggtgttagttgggggagcagaggaggagaggagggagaggtacctgggattgacatgtaaaataattttctttctaataaaaagaaaaaaaagaaaagaaaaaagaagaaattgaccagtgatttagtaaaatataaagaaaaaataaagatgtatgaaaccaacagcctttctacattttatcatccaaaatcctgtactgcatacattccctagagccctggtctagttctagacattgcctcttagccctcacacctgcctacccatgtcatcctcaagatcataaagagaagcagagccaccgcctcagcctcattttcctatagaaccggtaagaactgttctctgacatcatgaaatggcttcagagtgtttcaatacctgtactctgttctagctaaaggaaggaaaggggataaaatgagctgaggatctttgacaaggagagaataggctttcctgtgtagaaacaatgagaaaatccatttaaacaaagaaggaactgaactcctatgatttgctttatttctgcacatcccacacaatatcagggaaagaaaagaaactggaccatctaccttttgtcttccccaaggtgaagccagaacagactataataatagagcagaaatacactcccatctgagagtccattgaattgcttctctcccctttcataatgtcctggggcacagttttctgaaacagccccatcttctctctccctacttcctgcgagcacccaacacctgatgcccatcatcctccccgaatcactgcaactgtttctaaacccattttccacatttcagttaagttgatggttgtccacacttctgcctgaatgtggtaatcatgttttcatgaaaaactactcattggacactcttgcataaattccttcaatcacttcaaagttttaaccacaatgttcaaatttcacttgcaaactgattatagtaataaagcacagggatgccatgaattaaacaggctcgatgcaggtgaagaatttgatctgttgcttgacatacatgaagccagtaatagatagttgttttattagtagttattctttttctgtttgacaacttagccagttgaaactcaatcacacctctctgtacttgtaaataattctttgaatacttcaaacctgattttataaattttctaatttccccttttcattctcctttgaaatctttctggaggtgcatctagcagaatcacaaatagctacttgaactgtcccaacacgggtatggattaggtgaaacacaattttcagttttatttctaacaacatctttatggtgccccaaattttacttcttcctggggtcatagtggctgttcatccaaccagtataactgggaacagtaggcagtttcatcaagatccttgcctggtatgcaactgataatttggaggcaactcctttacaataggtttccattatacctgtatacattgaaattcatgcccattattcttggcacttaatttcatttcagcaaataaaagactttttttcagacctgtaggtttatgctcatgatctggaatgttttttcccttccttctccagtccacttattcaaagttaataacagtctaaaaatgtctctctggttaccattatgtaagagactctttaagagagaggagtgggtaaattagagatattgacaatagtagagcccctcccctaggctttgtatatgtatgtaaggaggacaggatgagaagtggtaaagtaaggaagtgacaattggatggaaagcacaagattcaaagaatgcttttgtttagagggcttttattttacctctctttttctattaggtagatggcaaaaaaggtggtacaaagtcttatctctggataataatggataagtgtattgtttatattgtttaagggaagggaatatacttatttttgcactttctgaatgtttcaacaattccctttgcattttagttagctgaaaccaaattttgcttggttatcatcaggaaaatcatgtatgtaatagcacatgtattcaatggttaaaaaagtataagtatattaatagtggaagagaaacatggtcaagatggtcattgtactcatggagtttgcattcttgaactgctttggataccagacttaatacaaaacccttcaagtattttatgcattatattaatatgtatttccagatagatccatagagcccttatgaaaggccatgttctccttcgcctatagactgccactgggatggatgtgtgtgacaactgagtatctcttgtaactgttccccctcttaacagaaaataaagtgccaggcagtgttgatgaagactttaattccagcactaactagggaggcagagtcaggtggacggatctctgttagtttaagaccagcctggggtctacagagccagttccaggacaggctccagagcttcacagagaaaccttgtctcaaaaaacccaaaagagaaagagagagaaagagagaataaagtaaaactcaccaggcgttagcttcttatatcttctagagagttgtgttcaagcctgagccccacccatcactctggaatttttattatctataataacatagattttttctaataaatacaaaagtttcccaaggtttttgtcaaggatcttttaaaaattatttaaagcctaccaattacttaactttaaattagttatcaaaacaattatattttaccaaaatacagttttgtcacagagttatcaatgttttaggagcaagatttgttggcactctgacaaacttccaagaagccacacctaaaagtggctacttcagtggagagaaacaatgccagtcatcctgtgtatgagaccaaaacaaaagacaaagaaagtctaagttttttcagattttctagttctacccacagtaagcttgtttgtcagtcacaaagcagtatgggaggagggtaatgaactactaaacttctgttagtatcctgggtattttactcccaaataacacttttttaaactccctaatgattaatagaagaaaacaggatatgaacaagacagtgccttgagacctcattactgaggcatctcattatctaattctgacattcatgcttgggagagctgattgaagtattaggagctatctcgctggataaaaggttaattttgcatcttggagtgggccagggtcctgttgggatctaggctatattttctgtccatttctccagtgccaacagaagggatcataaggcctgatatattctaagaagagagcagaagcagctgtcaagcagagtttgagaaggctctttcttcacactcagacatacacaggaatgatttctggtacttttgacacttgaagccagtttaaagtgtctaggtggaatcttcaaccctgtcccagaatctgttgtctctaaagtgatatttgtcacctctgttccaatcaccttacactctacactcattctcaagccttagctcaagttagttccaaacctcagcttcactgggtatccttgatactccctaatcaattgatttcccatagcccaaataggagtcaatactcatctgtaagtttttttgggggggtggtttgagacagtgtttctctgtagctttggagcctgtcctgaaactagctctgtagatgaggctggcctcaaactcacagagatcagcctgcctctgcttccctagtgctgggattaaaggcatacactgcaaccaccatctggcttcatctacaattttaaaatacacaaaaatcaggactcattttcacatttgtgaggcaatttggagtccatcacattcatgtttgttctctcagtattcttagaattgggtcattcaagcaataattactaagacttctcataggttcttatgaagtgctatatgtaaagctatacagtatacatatactaacttattttatcccaactaaaccccacttagaacataactatacctgtcttccatgcttctataacataatcttcttttctttatggcattgactggttaattaagaaatcagcattaaacacaagacacctaagatatctgacctcatagttttgagatacacacacacacacacacacacacacacacacacacacacacacacactgatttgaagttgttttcaatgttagtggaattgccagggataacaaactaagaagtcactttttaatagggaagagaggattggaggactgattcactttccatagaatatattttctgttgagtaggcaaatgtttaaaaagatgaattttctcatccatttgtttgtttgttcatctctcagtgatgatatcataaaataaaagaattctgattgtctgccagattttgtctcccactctgagttcttcacattttttgtcacctcatactaacacctgaagagtgtgagtgtgtgtgtgtgtgtgtgtgtgtgtgtgtgtgtgtgtgtgtgtgtgtgtttaagaaactgagttcaagtgaaagaattagagtcattgattctttaccaggattcttttcagccttccactctccattgctttatataatcatttcgactatgtgtctaaaacaatgctatcatcactaagtgatatggatataattaaattctttaagaatcaagcatttagaaagaaaggataaaataaatgtgttagtctgacattcaacttttgtggtctctttttattttaattagaaagaagattattttataggtcaatcccaggtccctcttctgccccccaactaacactttacctatcccatatcctttctgctccccagggaaggtgaggccttctgtagggggtcttcagagtctgtcatatcctttgggataggacctaggcccacccccttttgtctaggctcagggagtatgcctccatgtaggatgggctcccaaagtccattcctatgctagggataagcactgatccactacaaggggcaccatagatttccaaggtctcttcaatgtcacccatgttcagggggtctggatcagtcccatactggtttcccagctatgagtcttggaaccaagaggtctcccttgttcaggtcagctgtttctgtgggtttcaccagcctggtatggacacctttgctcattagtcctccttctctgcaactggattttagttcagttcaaggtttagctgtggctgtctgctgctgcttccaccagctgctggatgaaggctataggatgacatataagttagtcctcaatctcattatcaggggaggtcatttaaggtaacctctcctctgttgcttagattgttagttggtgtcatcttatgtggtctctttagggatctgtcatttgttgtttgtagtctttggtcaaaagaacgtataaaataagcagagcatctgcaatcaccttatgcacttatacatgaaagagtgagtggaaataaattaaccctcacaaagattgaaactagatctaaatttacttagtccctggttagatgaaaatgatcttgtccctactaccacctgccagggagtacaataatatccctactacaggaagataatgtaatctagagcttcaatttgtctttataatttattcatgtaaatcaggaataagcaactatggcctgccagctgatgtgaccaccatctgtttttgtacatactacaagatgtaaaaaaaaatgctcagaatttaaaatcaattaaaaataaacaaatggaaagatattttttaaaaagtatgttatatttaattttattaaccatacaataaaacatattttaatttataaattatctatagctattttgggttacttttgcaaaatttaatgcaacagagattacggtccaaaaccttaaattatttatcatttggcccttatcagggaaaaatattgactactgatagagtgtttaggatgcaatggacctgtatagatgcatcaggagaaatgaacaaagagataaagtcaagaagaaggcaaagcacacagtagggacagacaaatgaaaattactccatggattcgataagatacaacattaagatgactccaaatgatgcaaatccatccaaagatgatccacctgtgtatcatcatactttggacagaatgggacttgccacttacaaatataatatagcaaagatgacaggatgtcaattacatgctagaatgcattatatagagatttgacttatcattatacattttatacaaaggtatgtacagttaaagacatgaaaagtttttaaaagttaaaggtccatgtaaccagacaggagaaagtcattcttccttctgtggctttgaagaagtaagattttgtgttttaacaatgcctattagtggattatgtacaaaacacctgagtaatttctgtaaacataacactcaaaattgacaaccagaaagaaaagcaacttcagtcctctaatcacatggaattaaattctttcaacaaactttggaagtgctcaccattctgcagcaatggcctcacccctgtaaacactctgtgggtccctgagactttgagaagaagacccaaaaagatggtgctcagatagctgagtaagaaaacaggtcaaaactgtatgttgttttaaggtactgagtttgatatgaagcaatagaaaactactctgatcagtattggatataagaaaatatagcctataattgaatattttaaactgaggatgggaaatagaaatgtgtcgaaggacatcttcaacatggtgaaagaaaatagctgctgtatgggagttccaaactcaaggaactacccattaaaaaggaaccaaaattagttattgaatttgtatcacatctttatacaacttagaaaagtccagcaaatcatattaatgggaactctcatatatctgagtacactttgggattattttccaatttacagtgccagcaaaatgacccagtgatgaaattccaagtctgaagacttggtcccagtacccacatagtggaactcccagaagttgtcctttggtatctacatggataccatcatgttcatgtatgcattgtacatggacacacacacacacacacacacacacacacacacacacacacacacacacacacgtaaaaatgagataactgtttctaaataaacaactgtttgaccactagagaaatggggctaggtcaaaagcaagtatgacattgaatgtgataagctgtatttagacacccacagctaaaccttcaactgaactgaaatccagttgcagagaagggtgactgatgagcaaaggggtccataccaggctggtgaaacccacacatacatacacacacacacacacacacacacacacacacacacacacacacacacacaaaccaccacaatcaacactactaccaccactaccaccaccaccaaataacagaaattaacaggcagcagtcatgaatacctctcaataccaatggagccaatttgccaataaaaagacacaggttattgctcctccacatttcagctaagatcaagaataaaaagagagaggctaacaggatgtatacaaagcaggaaccatcctgctacatataagaagcacacctcaacatcaaatacagacattatctcagagtaaagggttggaaatcaaatggaccaaagaagcaagctggtgtagctagcataatatctaacaagatagacttcaagccaaaaattaatcaaaagagatggagaagaacatttcatattcctcaaaggacaaatccaccaattctgaacattgattcaccaaatacaatggcacccacagttataaaacaaacattactaaagtttagatcacatatcaaacccacacattaatagtgggggacttcaacaccccactttcaccattggacaggttgttctaacagaaactaaatagagaaataatggaaatagccgatgttatgactcaaatggacctaacagatatcttcagaatgttttgtccaaacaccaaagaatataccttcttcccagcatctcatggaaccttcttcaaaattgaccacatagtctgaaacaaggcaagtcttaaaagatacaacaattggaataaccctgtgtatcttcatcagatccccatggattaaagttgtagttcaacaacaacacaaactacagaaagcctacaaactaatgaaaactgaacaatgctaaactgaattaccactgtgtaaagaaaaatgaagaaagaaattaaagacttcctagaaatcaaagaaaatgaatgcacaacatacccaaatttatgggacacaatgaaaaagaaaagtccataacactaagtgccttcataaagaatttggaaaaaaattatactagggacttaacaccacacctgaaaaccctagaaccaaaaggagtagattgcaagaaataatcaaactgagaactgaaatcaatgaaatagaaatagagagaacattacaaagaatcaatggaacaaagaattggttctttgagaaaatcaacaagaaagacaaatccttatgcaaactaactaaaaggaagagagacagaatatccaaattcacaaaatcataaatgaaaaggggtgcctaacaacagacacttaggaaacccagacaccattagatcatacttcaaaagcctctactccaaaaaaaaagaaagaaaatctaaaagaatggacaaatttcttgaaagataccatataccaaaattaaatcaagaccagataaacaatttaaacagacctaaggaaatagaaagagtcattaaaagtctcccgagcaagaaaaactcagggtcatatggtttcagtgcagaattctatcagactttcaaagaagagctaatgctggtatagaagcagaagaaacattgccaaattctttttatgcacccacagttaccctgatacccaaaccacaccaagatacaacaaagaaagagaattacagaccaatttccctcatgaacattgatacaaaaatactcataaaatgttggcaaaccaaatccaagaacacatcaaaaatatcatccaccatgattaattgggtttcatccctgagatgcagcaataatggttcagcatactaaaatctgtcactgtaatccaccaatccacaagctgaaagaaaaaacccacacgatcatctcattaaatgttgaaaaagcctttgacaaaaatccaacacctcttcatgataaaagtcttggatacatgtaacatacctaaatataataaaagcaatatacagcaagccaacagtcagtatcaaattagagagaaactcaaagcaattccactaaagtcaggaataagacaaggctgtctactcattccatatctcccttgtggccaatagaagaaaaattccatagtcagtcacctgatgagcatgtttagaaattgagcccgttggaaagaggatgtgatcactgctagttgttattaagtgggaaatgaagagaaaaggaacactcttttgaacccacatgtaacacttcctgatgatcttggcagaggcaattagaaactcaaatccctggatgaccaagagagctgagctgtcttccagcctttggttacctgcctagctctaggcagttacttaccaagtccatgttcccactgatgtccaactgtgagatccccactttaaagttgcattctgctgttgtatccagggataccatacacttctctgtcttagtgaggctttctaatgctgtgatgaccaaaagcaagttggagagaaagggtatatttagcttatgcttccacataactgttcatcatcaaaggagtcaggaccggaactcaagcagggcagagtcctagagtccggagctggtgcagaggccatggaggagtgttgctttcttacttgcctctcatgaatttctcagtctgctttcttgtagaactcaggatcttatggaggcattttcttaatttcagttccctcctctcagatgacttcagcttacattcagttgacataaaactatctggcataattgacttcttgttaacttgatatacaaacacatcactattaagccatgacctttttcattcatcccaaagatttcgcattgaatatgaataactttaaaatcccccaatcattataaattcaaattcattaaaagtccaatctctttaaaatagccaatctcttttattttatttttattcatcatttttattgctttatataccaaagacagtttccccacccttctctcctgttccctcctctcacctccctcctaccctcccagccactccttctctgtctccattcagatggggtaagacctctcatgagaatcaagaaagcatggcacatcaagtcgagacaggaccaagctcttccccaccccggccccacgtcaaggctgagcaaggcttcccaccacaagggatatgttccaaagagccagctcatgcatcagggacaggttctagatgctctgtaacccaagaatggataaagaaaatgtgatatatctacacaatggaatattactcagcaggggaaaaacaaggatatcatgacattcacaggcaaatggatggaactagaaaaaaaaacattctgtgtgaggtaactgtgacccagaaagacaaacactgtatgtattcacccataaatgcatattagatgtaaagcaaaggataaccaggtgtggtgataagttatttatgatttaataaagtcgctggagatcaaagctaggcacagccatagagccaggcaatggtgatacacacctttaattccctcaaccacactagttagctatagaagctggagagtggtggcacatacttttaatcctaggactcaggagacaaagacagatgagttcaaggctgtgagttcaaggctacctaaggttacatttgcgtcaatcagtctaaaaggaaacagctcacacaaagcagatctcagcacttgtcgtcccatgtctttaatcccaattttggagaggtatacaagataggagcagggcattcagtattcagcctcagagatttttctccagccactctgaggatagggacagccctttcagcctgaggtagaggtaagaaataatggccatatgctttgcttttttaatcttcagcttgaatcttaatatcagccctggatttatattattcatattacacaggctacattactcagccccagagaagctaggtaaccagaaggatcctaagagggatacttggatcttcctgggaagaggaaatagatgagatttcctgggtaaactgagtatggggggaagggaagatgagggatcaggatggtccagttaggggtgagacacagggggagagtaatgaaagagatatcttgatagagggagccattacagggctaggataaacccggtgccaggtaaactcccaggaacccacaaggaggatccagttaaggctactagcaatagtggagagggtacctgtgatggggaatgtactactgtgtatgtttatcttattgattattgaataaaaaactgtttggccaatgagacagcaagttagacggaactaggagtcaaagaggattctgggaaatgtagtagagaagtgctgatccaggcaggaagttacatagcaaggagactcatatttaagcgaaagagaaacaggaagggctctctctttccccttggctcctgctccagcggcacgatgtgattcaccagcaaggagggatgccaataaggcatccaataagataagtcccataaaatatatagatgtatggtaattgagactgagctaacaaatgagaatcctagtcattggccaagcagctttgtaactaatacaagtctctctgtgtattcatttgggcctaactcgggtgggcggctggcataaagctcgcacgtggcttttggcagaaagatttatagtaacatacctgaactgaccttcccctataattagattggtgactaccctaattatcaccacagagccttcacacagtacctgatggaagcagatgcagagatccacacccaatcatttggccgagctctgggagttcaactgaagagagggtggagggatcacatgagcaaagggatcaagatgctgatggagaaacccagagacagctgacctgaacttgtgggagctcatggattctgggcagtcagctagggagccagcataggaatgacttaggttctctgcacctgggtgacagttgtatagcttggtcttttgtggggctcctaacagtggaaccaggacctgtccttgatgtatgagctagctctttggagccaatctcttttgaaacccaaagtcttctaaaatacaataaaaaaaagactttcttacttcaagagagaagaaccagggcacacatacacaatcaaattaaagcaaaccaacctccaaaattttaaacaactcaagaaccagggtctgagattcactcatgatattcttgtcttttccaaggggcttgggctactttgccatctttgcccactgcaacacacagcttgatttctaggctctaggtggctccactccactgctactgctgtccttggtggtcatcgcacggtcctgatatctccaaagtactggggtcttctgctacaactggctgcagtttcaacaatagcctatcatatgttctatccatggtgataagtcttagcatctctgcatgacacctctagtcctgggtctttaactaccactgaggctgcaccttccttccccagtggcctctcttggcctcccacagagccaagcttcagctgttctccatgaccctttcatgccttcgaaaccagtagcacctgggtgactcctacactaccaagctcagctgccagtacaaggtacaacattggccacccctggaacacagctactgtgtgcttacactcaggaaacacttcccagaagatttcaccccaatgatgctcctcctccttttttgttttatcaagacagggtttctctggagctttggagcctatcctggcacttgctctgtagacaagggtggcctcaaactcacagagatccacctgcctctgccccccccccagtgttgggattaaaggcatcagccaccaatgatgcttttcttaataattgctaatttctcagttctagcagaccaggattgggtatccctgaaaagcaaaggtcttactttagtagttctggtatcttgtcaatcacagctcattctccagacatagctaatcagaaccacatcttaattcaaaaataacaaaaggctctaatagagtctttaaactgccctctgaaactttatatatcaggcctccatcatctgcattgccctcaacattctttccagcccccacagaacatctcaataagcactgaacagtcaacagtttttcttacacaaaattctaaagttctccccaaatcttctccaaaacaacacagtcaggtctgtcacagcaatccccactcccagaccaacttgtctttgttagagtttctactggtgtcatgaaataccacaaccaaaagctagatggggaagagagtgtcaagttgatacaaaactatcccacatattcacttacatagtttgcaacatgtgctttttctttctcaaacactggaaaggcataggcacactttgaatatgtttcattattgctgatttccagcacaccactatgattgaagctttcctactggagggcagagacacaagactgcagtgaaaataaattgttcatgaagaattataaaaagacaaaaaagaaaaaagaaaaagacttcttgatcccgaaggaaaaatcagacttttatttctaaccagtttttttttcccaaaaagataatactgtgttgctgacaactaaattgagtcacagtgaatttagctcaataaacatgatggaatcatcttttttttaaacttttcactacaatatatcatagccaaaaatttgagcaattgtcttatgccaatcattgttctagaaatgaaatcctaaactgtgcaggaagaggtgctggtaatgggccatgctatggatgtaaatgcatcacgtttattgttgggtgctccctgctcctatacctctgtcagagaaaaggaagaagggatgagaaataaaacacgttgaaatgatagacagtcacagcacaaaatcttagactacctcatagatgagcactcatgctgggatgagagtagctcttcatatttatcaaagagagaaaaaataccctgaaatagaaaatcactggaggctacatgcaccccaaaccaagtagaaccttagaggctaaggttccttagtaagaataattcctgaaggggactcactgagagcctcagcccagtgttctctcatcccttgaagaaatcatatgtaagccctgatcggtacaagccggggatgtacatcaatatccaacagatgacttcagaaaagagatggtattcaccatcagactcacactcaacagctttgaactaagttcaccagaactctgaggcaagcattttgaattgtattttgaccaatgtcacagaagtgaaaccaccatcagttctacaagcccagacacaaaaggaaagacatcttcattccagatcaattaactccatatgccattttagttttgcaaaatgacgtgtgtttatttgaattagaagactcgttcatttctacagactttttcaatccccagcaccccataagggattcattacttctacggaatcatatcacagcgtctgacacattgtatatcccacacaagctgtttgaatctctgtgtatgtttgttccccagaatagatgaccagtacagagtgcaatggtgggagagaagctccttcctcatggcagagcatctattctcgaattccatgataaacagaatggacattaaatgctgtattaaactctgctttaaagcagatatcccaaaatcttccaaaagttcaccaaaaaatgtttaggaacaacctattctttttagtgcagttttggacttctgttcattaataaatatcatgtaagttgtagttaaagtgtttacattttagcaactatatttttctagagttcaggctcaccctaaaaagtgaactctatctttactggactcctttcaacctctatcccagagtccagagctgtaggatttccgtagcacagggcaatagcaggataaccaagaggagagtcccagtcagggcccagcattgatagtgtaacagaaaccagaggcctcaaaccagaccaatgactctttgtaatgaacacttgcaataaagatatatgggcaaaagctgttactgcatgacactctatgtcacactgcagcttccatgatgggattgccccctgcccccgttttccttttctttttttctcttaaattttacttgtgggggctgcaagggcagagggtggacacacagggtgggaaatgaatgggattgaggtgcatgatgtgaaagacacaaagaataaccaaaaggaaagtttcaaaaggaaagaattttatatcctacaaaaaacttttgacattattatttcattatttaattacatattttctctccttccctcctcctcctgaacatttccatgtaccactccttgttctcttcatattaatggcctagttttttatatgtatatatgcacatatttatgtaacagcaattaacatatatatatgatatacataggatatatttaggagtgtatactataggagttatttaggattatatactatattaatatataatgcattgtgttatatgtataatatatatttattatttatatttaataatatataataatatacatattatatacatatatattactaaatatatcctgttcagtctggataatgttacttgaatgtatgtgttcggggctgtacttttggtatttgatatccaattaatgtgcgctctgtgagttacactagttccccagctctcagcattcctgaattgcctatttctttgtataggggtgaggtctatcgggatttccttcatctgctttggcatgtctaaatttgttgtcctttttcagctcatgtttaggttcattttggtgaggctttatgtgtgtagcttccggtattatcaggagacacaggctcacaacaaacttcctgaacctttggctcttagaatctttttgtaccctctcctgcaatatttcttgagccttaggtgtgcaagatgttttgtaaatgtattccctgtgattgggctccacattgctgtttacactatttacactagctacacatggaaaccatatacgtgttcttcaactgataaatgtagaatgaaagtgtagcatatacgttatgagacactattgatctttaaggaaaaatgattcatggactttgcaagtaaatggatggaactagaaaagatcatattcagtgagctaacttaggtctagaaagacaaatgttttaagttctctcacattggagtctcctagttccaaatcttcagatataagtgtagacatcagcccttatcaaggaaatatttctttgctgcatacaaaaatcaatacagaaaacaactgatcagaacatgttcaacttttaatatggcctccatttcagtctatgttcttggttatgaatctcagaactggggataacatattgtaggtgacacctttacttaccatgtgtgcacttgcaatttgtgggtcagttagagcattccatattcttagatggtcctccatagttttgaagttaccatgattataatgcagtattagcaaattgcaaaaccagaatgcagaagtgtttttgaaagaaagttgtgtatgttcctgtctcctcacttacttatcaaaagaggttacaacctgacacctttaacttcaccaaaaatgttttgtcaacatgtgttaaaaatcatttgttcatatcatttagaaccctgatagactttgattcctcctcttcatttgtgtaaatgataaaaaaaacattgttaagatgtgtctagttgcacacaaatgcatataaaggcatggaggagagagtagcataggtgaacacacttttatactgcagacttccatgtacgtttagaggaggacgcagataaacattgctaccctggaaggaagctcctgttttatcaatcacttcactctaatttgcttttcttaaccttatatataaaaacattattggaatatcagaaaaataaagtcatacctatatcatcaaaggatgtcttttaaaaaattcctattaagaggaaagaggcctaagacctatggcttttcgtagagcctctttgacttccttatttctcaaactgtacaccactgggttgagtagaggagtgatgacggtgtaggtcactgagatgagtctgtcctgcccaagggaactctgggacttgggttttaggtagatgattgaggcacagccatagtggatgatgaccacagtgaggtgggaggcacaggtggcaaaggccttcttacggccttcaactgatgcaatcttaaggatagtggaaataatgacaacataagatataaagacaaggcccattggtaaaacaaggacacagacactgacaaccaaattgatgatatcattgatagtggtatctgtgcaggccagtttcagcaggggtctcacatcacagaagaagtgagcaataataaagccatcacagaaaggtaggccaaacactgatgtaacctgcacaatagccatgcctaggccaattcccagtgacccacatgccaagtagatacaggccttcttacccatgataactgaataccttagaggattgcagatggccacatagcggtcataacccattgctgtgagaagaaaacagttgttgatgccaaaagttagataaaagaagagctgggttgcacagctttggatatcgatggcctggtgaggagaaaggagaccagagagcatacgaggaatgatggcaatagtatagaaagtctcagagatggagagtaagctcagaaaaaagtacatgggtgtatggagatgacggtccaggcgaataatagtcacaatgatcacgttgccagacagagtcagaaggtacaatgtaaggaagacaatgaagaagacaagcctgtgttgccaaccaaagctggagaagccttcgaagaggaactcagtcacaaatgtggagttctttagcattgaggcaggtgaaggcttcagggaactgggcaaagggaaaaaaggaatgatgagccaagcacaaaacagaatagtcaggtcctagacccttagtaagtaaggagcatgccctgtccagcctgggagttagatactattgtcatatggactcaactatttgtgccttgttcagtcttcctctgtgcccaccctcttctttggaaatgcagagtagttagaggaggacccttggattcatggtgagacagaaataatatataaagtcaagttaaaggaaacttgtagagacagtggcccgatttcaatttttcaacccctatggccagaaaattgaatcgctgaagcatttgataattctatctttaagttgttagcatccatttttttctatattgacttcatcattttatctctccaccaacaataaacaagatttccaacttttctcaaccactcccaaatattgctatatcttcatgaaaggtttgtaacatcatatcacctcactgttagcaagtattccattgtgctgtggatttgcatttcccccatgattagtgatagtgaacaattttctgcacacctgaattgaaaacaaaactttcaagcagcagacttgtatatttgcatttactgctgctcagtgcctaagcaacaacttacagaaacaatttagacatccctagacataagtttgagaaatgaaaacctgacatacatacagaacagaatgctatccagcagtacaggaacgaaatactgcatttatgatacaatgggtaaatatgtattatcatgatattgcaaattaaatgggtgactcacagaagaacaaatactgagtggtttcatttatatgagtttttttttttttaaagtgtcaaatgataaaagcaaagaatggtatttaccagactataagaccagggcattatggagtggtaattcaacagctgtgatatttcaattctacaaaatgaatcgggttttctatcatccctacaaaatactgcatatagttgtaatatttcatttccaacttaaaatattttaaagggtttgatctcatgttaattgtcttactacctaaggagtggggaagagcatataggaacacaagaaaattctcaaatttgataaatatgcctttacatggtgctggtgaagatttcatgaatgaatgcctatggtcaaactacacacacacacacacacacacacacacacacacacacacacacacacacacgcacaccaagtacacccagtttagtagttatccattatcttttggtaaaactgttttgtttttattttatggtaaaactgtttaaggaaatcaagaaataacttcttggtattagagaagtagatctagatcatgggaaaggcagtcgagatattaaatattaccgttctttaatccttccccaacgcatcttgaattatgactcctgagatcaaatgaacacttacctagtgaaggataaaagtcatcagatggtgatatttttctccatcctatcagctgcattcaatggcaaatcccctgtgaagatcttaggataagttctctacagaaccccatatgccttcattgtctccataagactggcaactaccaaccactgtcatcctgaaaaacagaaaaagttgcatgtctgcttcctgtcttcctagggattctgccacaactatcctctcaccccataaaacatggtttttataaggcagggcaaaaattcttgaaatctagccccaagaagtaaagagcattaacaagccttgtattatccttttaaggagggagtgagctccaggaaggcaaaattcatttaatcacaaactgaaccattatcctatgcccatttcttttcttcattccatgatgtatttggtagataaaggaactaacacatctgtactttctgtcttcccacagtaatctcagcatggaagagtctactgggaggaaatccaaacttatacccttagctaagcttaaaattaatgtcatctagaaagtcacgagtccattgaattgtttctatttcattttttcattcatcccaaggcaattcttcctaaagatatcttttctgtctccacccccttcttcttcctacttctcaccaacactcaaaatctgatgtctgttatttcctgtgttgttgctcttgtctctaaacccattttcctcattttgttggtcaaagcttgtatcttcctcccaaatgcttcaatcatgtttttttttccccaaaagatctggtcattaaatactcctgcatagatcctaaaattgtttttaaagttttaagcataatattaaaattcacttgaaaattgattatagtaatatagcagagagctgccacggacattaaccaggttaatgtaggtgaagaatctgatctgtactttacacacaggaagcccttaaaaatgggaatgttattagtggatattcctttttactttgtaaaaatgacccagaatacattatggtgtaaagggaggtaggagatttaattaaaaatgtagggatttgtaaacaattgtttggccatcttaaacttgacttatgagttttatcatttctcccctgtttacacataggattttattttcatcgttaaaacttaaacttttatggggctaggagatagatctttgataaataaactaaccatgcaaatgtagccacccgagtttgatccctgtctctacataaagataaaaggagagaatcaacttcacaaaattgtcatctgacctgaacatacatgccatggcacatgcacctacacacacacacacacacacacacacacacacacacacacacacacacacacacacacacgccatgtacacacaaacacaaaataatgaataaaatgtatttgctataaccctttctgtaagatggagtcccatgtctgacactgcctatccaggaaccagaggctggatatcccagagtctcggggtagaaccaaacacaactaggagaaaaatcaataaaatgactactaatgctgtcccactatacctatagatcagtgcctagcccagttgtcatccgagaagcattattcagcaactgatgggagcatatgcagagagccacagccaaacacaaggcagagtcagggaaacaccacaggagaggaagggtaaggattgtaaaagccagaggggtcaaggataccctgagaacaaacccacagaatcaactaagcagggctcgtaggagctcacaaagattgaagccacaatcatggatcctgtatgagttggagcaaggatctctgcctatatattatggttgtgtaactgggcatttctgtggaacttctaacagtgggagtgtgtgtatctctgactcttttgcctactcttggcagcctttttctcctaatgggctgcctcacctagccttgatattaggatctgtgcctagttttgttgtaacttgttatgccttgttgggttgatatcccagggaggcttaaaaaaaaaaaaaaaaaaaacagaaacaggaggggtggacctgggagatagagaatgtggggagaaagactgggaagagtggagagaggggaaactgaagttgggatgtaatgtgtgagagaagaataaaataaaataaaaccctatgtgaaagttcaacgatcatatgttatcctcactaaggtatagagtaggtgaggaagttctagctttgatttagtccttttcatggtgatgtccttcattttacttctcctttatatcagaataggctatctaattaaaacatgtgggaacatgtttcagtgacaccagatcttttgttggattaaggatgaaagtttggaacccatcagcaataaatcagccgtgttgtctgtgtgtacactgaaatactcttcctaaaattaatcccacttgatttgctggaaaacctctttcatgcctgtgatctccagcatccctgtttccatttttcgccattccattaatccattttaaatttttaacaccttcagaaactctattctaggacaaatatgtggtaaattccagagacacaataatcagtaggaagcacagaatggtaggacgaatatgtggtagactccaggagacacaataatcagtagggaatagagaatgggatgatacattaaaagcattggcaagagtaagagtatataattagtgtcttggaaattcagatgaggagggaaagaaaataggaaaaaggtagtaatgtaaagtggaaagaaaccaccaaactcagaaagtgcctgtgagtttgaattttgtgttacttttcctttctttcaaataaacaacaaagggttgttaaaagcaaggcttgtccatggccgaacactaggtaaacaaatcatctccagtttttactaaagaaaagtcttatcttattgtttatagatgtttttgtatatttttgaggttttaatttaattgtagtatttctaccttctctttcctccttccaaaccctctcacataccccccttcactctatttcaaatttgtggcaatttttttcactactgaattttgaatttctcctattcatatttgttgctgtgtccaaaacttatttttattttatccatcaaggtaatttcttcatcaattcactgtgttcaacagtcacaaataaaagactgtacttgtgttagggaaagaaaaatgaccatggtggtcttcatatgctaggagattgcattcttgaagagtctttggaatatgacccaattaaaagcccttgactggttttatttcactcctctcttcattatttaatgattaatctatagtcccaaattcccagaaatcatatactcccccttataagtgactgtgttccccatctcctacagactgcagctatctctctggcagctgagcatatgttcgaatgaaactccccaccctaaatactaaggaaaatcagacttaccaagtatcctcttccttccacattccactcatggatgagttacattcatcgccctggaaaagtgaccacctgaaataataggttgcagattttacccaactataaaatgattcataggatttagtcaatgcccttcataatgtcattttaaatccactcattccttaactacaggatgcagaatagtctatgagtttccttataacagagtcactgatgttttatatgcaaggttatggcttaatcccacctctcctttgctgacaactctttgaccctcagccctccaaatgtcaaacccaaaagcaaccagtaaggaaagagacaatgctgggctcaaccttcctgtatctgagatcaaaatgaaggatagcaagctctataagacttttagttcaacctggtggagtagttagaattgacaataccccgtggttatcaataaggtattaaactgctgtgctgattgttaagtatctttctccaaagtagcactttttctccccagtggacagtgagagaagtcaaaatacaaacaacaaagtacctagagaccttgctattgaggcagctcattacttaaccagtagaacacatgggaaaagagatctggctgagctttggaacaatctctagggtgaagaggctaattttcctgaggtaagaagacatggtccttactgaagtctgtcatgttttgtgtccaattccccagtaccaatagaagtgtgtgtaaggccttatgaattctaagaagaaagtaaaagcagttacttagtagagtttgagcaaggattcctactgccaggcacacccatggggtgaattctgatgctctgacacttgaatcacatttaaaatctcttggtagactcatcagttctatccctgaactaaacgttcatcagttctatccctgaactaaatgtttatattttgaacatgtattatttacctgtgcactgattatctcacaacctacactcagtctcaagccttcagcttaatttggccttggacctcaccctaaccaggtcattcctcaaatgctactttcagctacattcaactttccatatcataaacaaagtttagcatgccattacaccctcagaatttgaaatagtttttgcatattttaactcttatttcttgcagggatcttatacttctaatttaattttgatcaccttatatatgagaactttcctactcactcatattttttttatcttactgcacctagaactagctattctaacaatcattgctaacacttatacacttaatataaagctatgttttttttcttttcttgatagacttagttaaaaagtgaacatgttgtagctctatggattttgttttatattttaaattttcaatgttttttgcctttttctttagtttgtgaagagaaatcgcagtatatgaatgcttaggtcttcttggttattcactatcatcaccattgttggtatttgtcattgttgttcacattttaagcttccctcacaaggttttccttgtgaatacttacttgagtagtgagtcaatggttgggcagattgcacaccaatagccagaatccatcagttatcatcttctgctgatcaacttgtacacagattgtgacaaacatgtaaagttctaacccctactcaagtttctgcatttttttgagttttaaataatattttaatgttttgagagttccatacaattatacttgtatattgagcacatagtttcccttggctttcacatttactctgtttttacagctctccattgaacattctttgtttcaatacagctagaggtacacagggtacttaactgtgcccatctaatttcaagatctcccaattaaacttatagtttattagctgcttttttcagaaccaagatgcatatctgagtactggcggatgtctccagaatgagttcaccacacaaagccagtgtatctgaaggattttactcagcctccaatgcaaatgaagaacggtttcctctgattccaaggcactgttttgtagaggaagttctctcaaacaagaataaaaggttctaataactgagctatgtgggtaaaagttaagtggctgaccatttggtactagataaccatttgcagggctcttccctagagaacactactttctcccaccccaagtattcattagttgtctaatatttttgtctatgattgagagcctcatgagatttacatcttctgcatttccatgtctgttgttgacaggctaccatgttatatttaggaagccacattttttgagacttcccaggtgtagattccccaatttttctagaaaattaacctcacagcaaacttcccggttttctgtctcttacattatgtcctcccccacttccatgatgttccctgagccttggatgccttagttgtgtggatcagatagggcagaacaaacggatcatatctagccaaacaccataggattctttgttttctgcattggatcagttgtcatgttctgtaatggtttctctgtgttgcaaaaacaagattctttgttgagggatgggagatacacttacctgtgtgtataaggaaaatatttagaaatggtatatgcatgtaacatatgcactgatcagattgcatctatatatttaaggatatgtgatacatacagcgtgtgtaagagtgtgtctgtgtgaaagagagagagaatgcaaaataatatattaaagataaaattttagaggtcattaacttgaaaagttataatgggaggaggaagataaaattggatggaggaaagtaaaaaaattacataaaaatggatggtgggaactcccccaaaaaatgtttatagactcttgatattccaacctgaaactcaagataattttgctaagttatttgcctttagtcaattcctgtttcttaagatggttgttaattataatgcagttgaactttatacagttgtttggtctctgtcatctttaatggaagttttatctatgctaacttttgtcattgtcccttaatccataactggttctaagccatagtaccatcaacttggcaaatgtatgcagaaattgattctaaatttgtgagacagaagttaatgcaagaacatgtattatgtgtgcactcagatagtgactctgacctcaaagtagctactcaaggatattctaatagctcttgcaacttgtagagctgcttaactggaatgtggactcacctctgggaagtctaataatggctgtttcctgacgactatgattgaatatatgtgaggtagtcataacaaaattgcctgaactctacagaaagagtaaggtctcaatgagtcaagaagcaactggaaccatgcacatagcagatgtataaagattatgcagttactaaaaatagtagtaatagtaattagttatttgcttgtagagccctttgatgctattaaattgttcatgatatgctgagagcaaaaggaaaatgtaaaatggatctttgcaacggtaataataatttttaagctctagtgttaatgaactaaatcctgacttgaaatactataaaaaggccaagagtcagctcatatccccttaactcctccaatggtcatatccttgagtatttctcttatgacattgatgaaaatacatgttataaatgatttttgtagccctaccagaagagaatggcatatattcatatgactggtcagtgttttctgaactgacacttatccataggtaacaagcagagttctgcttaaaggatcctgaatggcgcattaagaagtggaatttgccagtcagtggtggctcacatctttagtcccagcactcagcaaacagaggcagatagatctctgagttcaaggccagcatggtccacagatcaagttccaggacagccagggatacacagagaaaccctgtctggaaaaaacaaaccaaaaagaaaaagaggaggaagaggaagaggaggaggaggaggaatgagaatgagaaaaagaagagaaaaagaaagagagagagaaacaaagaaagaaacaaagaaacaaagaaggaaggaaggaaagaaagaaagaaaggaaggaaggaaggaaggaaggaaggaaggaaggaaggaaggaaggaaggaagagaaaagttgaatcttggcattagagtttttacaataccacttcacagaaagtttggtgattcccaagcatattctggtttatttgtctatgagtcaaatgagacagacatgctggaaaggtatcatatatctaccactttaacccatttcctgagtaagcaatgagcaagaggaagaaaaagaaaaggctctaaaatgagctgagtgtaaacagcttcaccactaacatgggacacagtagatacactttaatccatactggcatgcatctcaagagcatattccaaggggaatgagcctcccctttattcaagttccctactctgacaattgaaagagactattgtgattctccatatgaagaattagacactgttctatcaagctgtcacaagaggctcacagtataacccctttatatttctatgaaaagccacactttccgtagataatcactatctcagaatgggctcctgagtcataggtggttaaagacaggactccagaccatgtagcctatgatgaattagttttgggatctcaacaatccaatgtgatcactctgtcttactccagagctccagctccaaaacattcacactggacaaacacagtagtaccctaattgtttttctgagctccaaaatgccactcatggtttcatgcttttggatctcaattagaagtttatatgtgattgagtcatcacttccatagaagctcaaaataagcctgaagttatgccaaaccttgcgtgtccccggtcccattagttccaaagtgattgctccctcaccttctctttgtttcatacctcagaatgggtttttactaattcatcaattcttcctccatcttttcttcctctgccttaaatttccttccataacttcatccagtttgtcttcaacattccagcttaaacttgatgacccagaaaaatattaaaagccggaatcacactagcacaactcacctacacttttccttccagtatttacttttccttctagaaatacccctgtgatagtcttagtttgaaatttgcctgcctgtgtaggcagcacatactttaagcaacaccatctccaaaatccagcccacagtccacttcacaagccatgaatcttagggagctctctatggataaagaatgggaaccatttactaatgtgcattagtaaatgcccaaacttactaatggcataaatgtattgtctggtgaccaaacagtctgtacagaggctgcatgtgtctagatgatgcacctatatttcaaacttgtgcaaacatggtgatgttttaactatagtttgctgtgtttcactgcttgataactctttgggaccaggcaccattaatggttttattgtgctagtatccccaggcaacatacttctggcacataagtgcatgctcaataatatttgtttattcaataaataaggaaagcatcctcagacatagagtaacagacaattactttctttggcatgtttattctgggtttgctggtttgataacaaaacatgtttcagtttctgagatgcaggctgctcctgtgagtcactaaccaaaggcaaagtgtttcagtctactaattgcccaagtttctaatgaagccccagggatagggcctcacattagttctcaggtgcccccagtgcccaggaatgactctcaagggaagtcttcagaatactggatttatagtcctgtttctctttctaggtaaaccccagacagcacatgtaagtttagggtttccagaggtgtctgctctgctgagagaccttctgaggccacaggatcaaacctttagcatggaatctgtcacttcattatgaaagtcctgctgacactctggaaatgcttacctgcttgccttgggaggttttaaattttttccactctggctttgtggagcatcccattcagggcctttctgtttgcaatctcaggcacaccatctcctaagaaaatatccatgatttccttttctgagttctcaataagtaagtgcttgttggaatgcaaaataaaataaaaaagcataagagaaatggtttttaaattttctggctttcctcaatttcctgctctctctttctgatgattttaatgatacagaagtttcagactttcttgataactttcacaaagtctggttgagacctaaagtgaaatataatattctctcaggctttgtcttaaataatggaagaatcttctgaaagtcaagacaagacagcaaataggactgcctttgtaatcccagtgttgtcatccgcaactaagggctttgtgtcttttgaggcagcaatgctgagagttacagccagtgactccttctcttctagaccaaacatcttgcttgaatattcatcctgaaggatttttttcaatgcaaatgaaaatgtgtagtcagatatgccaggacctcacacttctggcaagaagtttatctcactgagtctcaacttctctatcaacaaaataaaatgatttgtgtatttggggagtaattttaaagacttaaatcacatagcctgtctacactggatagcaccaattgttacttagtgtagtttgttcctcactatttcagtcttatctagttcatgggccaaaattgtaattctaacaatttttgtcacccaagagctactttgattctattttttatgatcattactggatcactagacttgttctatgtcttttcataaacattatgtggccattcaatcattactccaggaaaataaatatacttggctcactccgtatgtatgtgggtgttaagtgagtatataatatattgactcaaggattctacacacacttggaacagagaacagaaagggaacaccagactttcctgaaattttccttcccaccaggtattaatacctgctttacaagtgtgaaacaccaggtccttgactgtgactcttcacagaaaccatccaaaccaacccctaacaaaataaacacacccctatgtctaatagcgttctctaaagtgaatgcattctctccctggcatcagcactccatctggccctcaggtgaaacagaatttttttcttccaggattgagatttcttagtgacaaagggcttggagctacaggtcaggatatttaggcttcagagttacccttccaaattgggcaacttttttgttcttttacaaattatttcttcacattatctaccaggtggctgcttctgaagaagaaaagaagatcttgtagacaaaagtccattcacttttctccaatcatttttagaaatggagccgcttatctaaatgtggactgggaagtgaaaaccaactcaagagccatttgtgtgtcccttctgaattttaagtggtaagacaacatcttcatctgtctgtctttctgtatactacctctttgtgaccattctctcaggcagccttccaatttctccacttaatgagtgctgtagacattactgcttcctgtctatctatatatcagcttttcttttgcttggatgcttcagacactccatatgcctgcaatgcccctaaagataagaatcatgagctctacatctcacagctctgaaagttctgaagtctacacttttacgtaattattgtgtcccaggtctgggttcccaaggcagagcttctgtggacatccaatgaaagggtgattctttcctgcagacaggaagtgctcaaaaacattccattgtgtgctggttcattcaacaagtatttgttgatggcctaaaagaaaaagatagaaatgaggattggttctagaaatctggaactaaaccggtatgagctctgtaatcaaagagctcatttgatagtcaaacaagtaattgcaatcacatgtgacaagagggatcaaacaaataaaatgtcaagaataaatgatgagaggaatatatgaatggaaaacagttgggagactagcgtgaaggagattattttaaatccccacctatgctgtaatatgtattcattatggctcagctctcatttttctccctctctgtgattgctttgccctgggtcagcaccacttcttaattactctagcattaccgtaagtcctgatgttggaaaggtaaatctcctttctttggatgcttctgggactttgctcttgtgtatatatattagcattagtttgttcatccaacaaaataaaataaccaacttgagatttgagtgacatgtactgactccacagatcaatttgggactaggtgaaacagtgagagtattgccttagaattcatagatgtaaccatttatttcacacttctttaggatggttcattaggttttgaaattttctctatagaggtctttattaatgagtacttgattttttttgaaatggtgataaatgatgtttcctagattaaatttggtataagtttgtggaatgcagaaacgcagggaagtttaacatagtaagttttgtgccaaaaagcttgctgaggtctcttaataattcattatcatcttttgaattttctatgattataatctgtaaaaaaatccaattttacttattctttctcaatctttgaatcttcattttttattaccttacaggattggctagaatacccaatgtaatgttgaagagaggtagataaagccatcatgtttatcttgttcataaacataaagaaaaaccttggataccttggcaccaagtatgatgttcactgtagggtttctgcctgtgtttatcagctgagacaaaatactttattctcagctttctatgggttttctcaagtacaaatattgaaaaaattaaaacctgtatcagaagcaatccaaatatcatatgaatctccccaatttaaacactttttgaagaaacataattgaagaattgtaattttaaataaattttccattctaaaagaaatctttgtcacttaactttcttatatacctttatatttaatttgttaatatctcatgcaagaaattatatttcagaggcggatttgcttaagtgttttctatggcaatataacattgaaagtttattaatattgatgttttgaattaaatttcttatacatttcctctaactagaattctttcttttattttttttgtggttataatatgattacatcatttctctgttctctatccctcttccaaacctttccatatatcctcccctgttctctttcaaatccatggctttttgtttcactaattgctattacatattactaaatataaccagcttagtctgtattatgttagtttctatgtgtattttcagggctgaccatttgccgccaatttgcatgctcttctctggatgactatctgtctcagcattcctaccttatctgtgattctttgtgtatggttgaagacttgtgcccgactcctatccattttgacatgtccattcatgtcatccttatttagatcatgtttggacagtcaagttggtgacacttcataagtgtagcttcagacattactaagggcccagatcgcacaatgatgtccctaatgctctgcccactcctctgcaatattcaatgatccttggttaagagggtgttttgtagatatatccatagtgactggtctccacagctccagattttgattgcatgtgattttcttacctgagaattgatgttgctaccggtggggctgggcctttctacattaattagtaattaagacaggcccacaaagcaatgaccacagaccaacctgattgaggcaatgcctcaactgaggtttctcctcttgatgactctaggctgtgccaattttagaattaaatttgaccaagacactggagttttcagaggcttggtttatttgttgttttttttttattgattcattgagaagttcacacaatatgttttgatcatgttcattccactctaactgctctcagatagaacccttccctacttgtaattttttaacccatcaagtccactttgtttttctcatatcctcagatgtgtgaccttctacttatgtatggtcaacacagcagggacaacattaagttgtaaagaaaattgactcttcctccaagaaactgtcaatttccaatagctcctttgtttggggtagagtttcacatatacctccctctctgtgttgagatctggccagagctaggacaaggattgtgcatgtagcaattgctctgacttcctatgtgcaactgtcatgttgtgtctgggggacactgtttccctgtgttcactgaccatctctggttcataaagacctcttcccctttttgtgaaatgatccttgggccttggaaggatgagacagagagaaatattctgtgagtgtatgctgaaccttggccagatgtaggtaactatatgaatcccatctacttcaagtagattattctctgataagggttcagatatgtgttcatctatgagtataaatcattaagagtcaccattgtatatcatatacatatatttagaagaatgattgctgtagatcctcccctggagcttagaacctgactagctacaggattctgctcaacaatggtgccaggtatgaggtgtttttcaattaaataccagtggctaggagtgtaatcatttcattttactaaaattatattgcaataaaataaaaagaagctactttctcctttttttccgaaacttatctagttatgttcctttattggttgataaagtttattcatatcttctttctctttgtcaatttcactagtgtcctacatttaagcttataaacatttaactttatatatcttatcattttattcttcttttattttattaccatgtacttcatattattttttcttcctattttactttttgtctttttaaaatgagtttatgagatggacattcttctgactatattacccattttcaaaataaacaatttaaagtataaattcaacactaataaccttctgtgtatatcacacatgttttggttatcattatttttattattatttggttctaaatagttcccagttatcattatgagctcttgtaactttttttttttttggttttttgagatagggtttctctgtgtagctttggagcctatcctagcactcgctctggagactaggctggcctcaaactcacagaggtccacctgcctctgctgggattaaaggcgtgtgccaccaacgcccagcttctggtaaccttttataaactatccattttatttttgaaaatttctaaattttgtatgctctacactaagaattattttgtaaaagagaatccaattttaagaaattttcaaaacaaattttatgggctatatacaaccattatgtaaaggatcaaaatttacccgggaagaatgttttacatcaggttcttagggaaggctaattaaagtttatttttatttctagtccaaggacacagtctatcatttctgaaggcatgagttgatgtttttattgtttttaattttattttggtgtatgctcttatttatgcaattgcatgtggttatgcaggcatgtgtacatatgtgtaggtgtggaagctagataccaaccacagatattaatgtgtagatgtcatcaaattagacttttttattttctaagtctgagtctttgtttgtctggagctcactgaatctaggccagctgccagtgagccccagggttctacctgtttccacatccccagttctgggattacaagcatatcccatgatgccttcctcttatttatatatttttaaactgtaagttctagtgattgaaattagggagtcatgctttggagataacgaccttatgaattgaaggtccacttctctacatctccatccatgagtttttaaccgaatctgcaatacaggatcttttctctgcagtgtaatgagggcactaagacacagtgttcaccttctctttatctttcagatctgagctcctcaatgaagagaaccaatttcacaggggtgagagagtttgttttccaaggtttctccaattaccaagaattccagctcacactctttgttgtcttctttgccctgtacctcctgactctggctggcaatgtcatcatcgtgaccattatccgtattgaccagcaccttcacacccccatgtatttcttcttaagtgttctctccacttcagagacattctattccctggtcatcatcccgcgaatgcttggtagccttgtgggtctgagccaaaccatctcgctagagtgctgtgggacacagctcttctttttccttggatttgcaatcacaaactgcctcctgctagcagtcatgggttatgatcgctatgtggccatctgcaacccacttcgctataccatcatcatgaattggagggtgtgtgtcattctggcatcttcagtctgtgccacagggttccttttctcactagttcaggctgtgtccattttcaggctgcccttttgcaactcactgattgaacatttcttctgtgatgtccgacctgttttagatctggcctgtgaagtgccagtcgtcaatgatatcttgacattagttctcagccttctggccatcacagcacccgccactttcctatttgtctcctatgtcctcattatttccaccattctcaagatagcctcagctgagggccggaagaaaacttttgccacctgtgcttcccacctcactgtggttgtgatccactatggttgtgcctctattgcctacttcaagcccaagtcagagaataccaaggaccaggaccagctgatctcagtgacttacactgttataacacctctactaaatcccgttgtgtatagtctgagaaacaaagaagttcaggatgcccttcggaaagtgatgggtaggaaatccctatcatagttgctaatttatgtccaaataatttcatcttttttcatatggaacccgacaggtaaagttatgaagcctaggtttcatgtgattagaagtctcatacatcatagccagggccagggagagggcaaaagtggagctgggagccagcctctaataattgcattccatttcctcaacctctttgttaacataataaaaacacaggtcactttcaagacctgtgcacagacagccattggccctactccagaagataattgcaaggtcagagtatgatcttatgttcattttgagcttaaatttaaaggaaccaatctatttcttgttgaattataaaccacacattaaacattactcaatggaatattctgttagtataaattagatgctcaagcaagtggagagcacacgaaggatatgtacagacatctaactgccttgtgttttaataagataagaaatgcaaaactaaagacatattttaagaaatggatttgggacaagctaaaacttcctagacaaactatcttcacgaagtcacacatggaactccaaatgaactccacttttcctatctgctactagtataactcccaatgaaagggaactaagaaaatgtcatgaagagggaaggagacattaaatggaaaagtttataatcagttaggacagccacaggagtctggccatatcatctgaatgcaagtgacttggtctgttcattgctcttattattgagaagccagatggaggagagggctttctggggctgataataaaatcatccttcatagaaaagaatcttttttaagtctcaggaaggaagaggaggttcttgagggagaagattgctgagaagtctgtgaaattggtgaagcaggaaaagttaggaagaaattgtctgagaacttcctgaaagttgaatggaagtgtgagatgacagggtgaggagggctaagaggaacagaaggactttagaaaacatccttctgattgagcctccttcttccccttgtaagccaagtcaccgaggcaagggaagggaactaggtggaaatttaagccatgataactcctgtgtgaaataaattagatgattccattactgaggaaaaactgagaaaaaactgagaaatgtaaatagtatggaattatgataagaagccttccaaaaattcaattatctgagcttgaaatgaaataacaacagactgcttactcttcctatcctcaaaaaatgaaaaaaagagagaataggggtaaattttagattctgttttcgagaaaaaaatgagtgaatgtatacaacttactaatttgaaggaataattattgagaaaattcaagtattttattatactgaaaagttagcttcaatatccaaaagaatacttgagtacacattattctccttgtaaaatgttgtcaaattacagaaatacctaatgaagtatgcaaagtgatggtgcatgcaatatattatgtatcaggtaaataatataagaagttcccttttccatctgcattgtcattcagaactcctaattctcctagattttttatgtaaacccagtcagtcaaagatgagtaatccaggttgagtaatgaataaattttgagttactgttcttttgtttccttctgcttctcttcacaatgccctatagcaaatccagttctaagcaatgtttcttaccctgaaggaaaaggaacctcatccatgctcatttctacctctgtttgctagatctcaggaagacacatgacccacagtcaacccaattgttatgccttgagaggactttggtgttttcatgtactttcatcagattccagcacttcatgtcttgttttcagccatccagtgaccattctatgtccaccagtcctatattagcctcttataatcctagacttttcagctctatttgtgatcctatgatgtggtgaactggagtaaacttggcatcctcaaaccaaccatctaacacctcacttacctaccctccctttcaggactttctgagtggcttctctggaaagtgaggaacattcacactcccctggcttactgactgagggcatcaagatttatctggggccggcggcaagagtctgcctcccctagtatcccactaactgaaatgccttcttatccaaaggttgtatgtctttatgttatccaaacagaaaacccagaattcttctcagcttcatagttcacattatatgtttcacacagaatatattagtgcttagattttgatactcaaaaccattttctccaaactacaagaatctcttctatctagaaaagtttgctaaacttcaaacctctttcagtttcaatactaatgtttcagttatgagttcttaaaagtctgttttgaaattcagttgacttcctctctggactcctttgatttttctctggggcaaataatgttccctagagtcctttagagcaatgtggaataacaataacaattgggaaaacaggagaagctttatattaccacccacaagatatctatccagagtttgcttctttggaaattcagaaatcatttacttttcatttggaacatttaagaaaaaaaaaagctcctgtcataagctcactgcccttgaatagaaaattctattttaaaatatggctctccagtagtgaaaggttcaggcattatgctggcctgcttgtgttacctggcagaatccactcaggcagtactctggtcagtccagggttccatgaatactacactgcctgaaggtgtaaaggacccctttaaaacacagacccctgcccacttatgctctctttcccttgatgctctcttctcttaccctcttcatctcttctcgtctgtcccctctcgctctcccctcccccaccttaataaactggttaatatagctctcggattcatgttccatttagcatgttttgtctttatttaaacaaaagtataacaagtagtatacatgtctccaacagaatggagttcaaatctcctttcctggaggttaatcctgtctgccagccacatctccatctaacatgtaaagtgaggtaggtttttcatctttctagtgggacagagggccttttcctatttttgcagaggtctaactcctcagaatgtccaatacatcgactgggctgacagagattcagggaaagcagtaattaaaagactgttaaagactgctaaaatacaggacctctaatcagtgggtaccaaatccaaaatgacaaaagatacaagtatgaggaggggaactgttaagaaccaagtgggtaatgggatgggagggagtgtggagaaggtgggggttagggtgatgacaaagtcctttttacatatttgaggttctcaaaaagcacattcaataaaaatctaggagaaagaaatgtgtctatccatgatcacattacaaaaactgtatcttcagactgtttgcaagcattgtacaagtgcatcagttgggactgatgcattttgtgacatttgaaatgactgtcttttcagaattgtcagtcagatatgcacatgaagataggccttcttttatttctttttccctttttcacttatttgattaactattattgattctttgtgtttttcttactttttatttatttattctccatttttatttaaattagaaacaagattgtttcacaagtcaatccctcttccctctccctcccctcctcccctgacccctactaataccctacctattctataccatttctgctccccagggagactgaggccttccatggagggatcttcagagtctgtcatatactttgggtgttttttatatcaagaatgccaatccatcccatccccacctgcccccttggcccttgcaacctccccactcaaagcaaaacaaaatttaaaagaaaaaccaaaaccaaactaaccaaacaagcagaccaagaaacaagaaagatgaaaaaataaagaatctcaggaaactgtggtgtggtctggtaagtctgtctctgactctctctctctctctctctctctctctctctctctctctctctctctctctctctcacacacacacacacacacacacacacacacacacacacacacttcaccctttagtccttttatctccatttacaagtaatcattgccctgagtcttgggtctggttcaaggcctctgtcctctgtcacacttttgacaatggactctgtggctttggctggagtgtcgtcattgtcctgcatcatatagatcctgcaggtttggctctgtaggttgccctcttctcatgttctaacaattcatagatgaagtggatgttggagtgggccctctctcagccctgatcctaggcctggatgaaaagggccaacctctactgttttgcccaggctcagagcagggccctctctcccaattgctatagggggcatacaaaggggtggtggtggggtgtcagctcttctgttctcacaccctccagcctggctcacctgtgcccctgacaacccatggagtgctggtgtgctgctctggtggattgcatggtccactctcctgtactgcagctggtgaggggcagggctagctctcctactgttgtgacccaaggaacagctgactagaccctgagcatccacatagccctcagtggtaacaagagtcctggacatcactccagaccccagccactgcagggctgcagacatggcccagacatgaccctaggcaacaacctgggtcctgacatttccatggttccagttagccgcacacccccaccccagccaggttaatatggcctctgcagtgacatggtcctcagaccccaacttggtctcaagtggatgactagaccccaggcatccacacagtcctttgtggcaacaggagccacaaatgtcaactcagaccttcctgcagtagggccacagatccggacagtagtagccctgtttctgacaacaccatggctctgggtgacagtgtaggcggttcagatcagcttggccctggaggcagcagtgctcttaaacccacgtggacatggtttgtggcctagatctctggcatccttgtggcttttggtggcaacctggaccatggacatcaatacataccccagatgtagtaggataatggaccagatatggtcctaagaagcagccagggttcagatgtcaccatggcccctggtggcagtgcaggctgccaggtttggcatggtccccaatggagtgtgtcccttgtacaccaacatgtcctcaggcagctcccctgatccctataatgagcatggtcattgatggtcttagaagcaatgcatattaacacagacccagactgcagcaggcccatggacccagatatggccctcagcagcagccctggcttgtatagcaccatggacccaagtgacactgctggccattcaaatatacatggtctagcagcagcacagtcctcagacaccaacacagtcacaggctgcatcctagactctgggcatcactgtagactttggtgacaacaagggctaatagatatcaatatggaccctgaccgtggtaggaccatgacttcattttttgaagaaaaaacttagtctagaaatacctactataagacataatggtcacccgccccttgcttccctgctgttctattaagtgacaagttaagttcacagtggacaatttaattcctctcctcccactatcttaagaaaatgttaataattgtccagtacttcttatttttaaactcagcctgatgtcagttgatttcccccttgttggccattcatatttgtctttaaatataggcagttcttggaattcaacttgttttcaaaggatagcatttttccagtgataaaacatcctttgcttcacatggaacaacttatattctgggacttagtatagttcaaaaatttcaatactattacatttctgtagtcattcaatcggtcaacaccattaagcattacagcttttaaaatttcagtcatacaatggaggaagttacttttcatttttctttgtacttttcccttttattgatatcaagttttttgagttctttatatattttggatatgagtcttctataagatatggagtacataaaacacttttcccattctttaggctgccactaagtctaaatgaccagcattcttggtgttaccgaggttttcatttagatacactttattgatttttgatcttactgcctgagttaatagtgctctattcagaatgtattctgtgccaatgtgttcaaggcatgtatttttctattaggttaagtgtatcttgtattctgtttgggtctttgtgtggtttagctatcagggtaactgtggccccatatggcaaattgggtgtagttacttctgtttctattctgtggaataatttgaggaatattggctttaacacttctttgaatatctggtagaattctacactaaaaccatctggctctggccttttctttcattgaagaaaattccatgaggtgcagagaagactgtatattcttttgtgtttgggtgaaatgttctgtaaatatctgttagggccatttggttataaagtctatttgcactaaaatttctctttttgtattttatctagatgacctgtctactggtaagagtggggtattgaagtctcaaattatcagcatgtgagagtcattatgtgatataagctttagtagtgtttcttttagaaaaatggatgcctttgtgtttggggcatggatgttaagaattgaaaagttttcttggtatattttttctttgatgagcatgtagtcccctttccaatctcttctgtattgttttagtttgaaatctgttttattagatattgaaatggctacatcagcttgtttcttaggtccatctgcttagaatatctttttccaactctttaccctgaggtaatgcccatccttgatgttaatgtgtttttcttggatatagtaaaaggatggtcctattttcacatccattctgtgaatctgtgtcttaggccattgatattgagggacatcaatgaccagctcttgttgattcctcttattttgttgctgttcatagtagtggtggtggtggtggtggtggtggtggtggtggtggtggtggctgcggcggtggtagtagtagtgtatgtgtttttcccttcttttgattttgctggtatggggttatttattacctgtgttattgttcttgtagataactttgttagtttgcagattttttctagaacccctataaggctgaatttgtaaataaacattgcttaaaggtggtttttgaatagaatatattattttctccttctatggtaactgaaagtttgcctaagtatagtagtctgggctggtatctgtgatctcttagagcctgtagtacatctgtccaggatcttctagcttttagagtttacactgagaagtcaggtgtaattctaatagctctgcctttatatgttacttgttcatttttcttgcagcctttaatataataatattaaatataatattgaatataactatattaaaactaataatatttctccatgggtttagtgttttgatcattatatgccacagggactttctttcttgatccaatctatttgttgtgctgtatgcttcttgtaccttcatagacatctccttatgttagcaaatttttcttctatgagtttgacgaaaatattttctgattctttgagctgtgtttcttatacttcctctattatttttattcttaaatttgatcttttcagtgtcccagattttctgaatggtttgtgtcatgaattttttaaatttaacattttatttgaccaatgtatccatttttctatcatatctacaaagcctgagatttttttctttcatctcttgaattttattggggaagcttgactccgaagttcatgttcaaattctgacttttttttcatttccagcattccctctgtctgggttttcatcatcaattctacctctgtcttcaggccttgaacagttttgttcatttcctttcactgtttctaagtattttcctgcatttatataaaggatttattcatttcctctttaagggcctctatcatcttcataagactgttttgaaggttatttgggggagggctacagctatgttgtaatattcagtgccttctctggtggggttgctagtctccagccaagacatcattttctggctgttattgattatattgttacactgacatctaagcatttggcattggtatgattataggtatggataataatagctcattttgtttctattgaataaatgttttgctccttggttactgcttcctccctggactttaggagactattaactgctgtgtgctgcctgataggaaattttctatggacctttttccctggtctgctcagctggtatgttcccaggttgctgggataatggtatgagttgagagaaggaaggttggaggagacgatattcatgacccctcggtgacagggtcagagtggaaagagaaagtgtagtagattgttctgctgcagacctggggatgagatgagggtattggatctgggggaacagagtgaagagagcatcatttctttatataaccagttctattacagatataaggcactgctatattgactaagtggtagagatagcattacattctttaggactgaataatttagaaagaagggatgtaaataaatgtgttagactgacattcaactctctgtggtctctttgaggaactgtcatttgttgtttgtagtctttggtcaaaagaacgtataaactgagcagagcatctgcaatctccatatgcgcatatacatgaaagagtgagtggaaataaattaaccctcacaatgattgaaactagatccaaattaacttagtccctagttagatgaataggatcttgtccctactaccacctgccagggagtacaataaaatccctgctacaggaagataatgtaatctggagtttcaatttgtctttataatttattcatataaagcagggataagcaactatggcctgccagctgatgtggccaccatctgtttttgtacacactacaagatgtaaaagagttcagaattttaataaattaaaagtaaaaaagacatatttgaaacataaagtatgttatgttttaactttattaaccacacaattaagttggttttcaataactaccacatgttttaatttatacattgtctatagctattttgggttacctttgcaaaattaaatgctacagggattatggtccaaaaaattaaattatttatcatttggcccttagattgactcccccttagagtgttcagaatgcaatagatctgtacagatgaatcaggagaaaggaacaaagagctaaaagtcaattaaaaggtaaagcacacagtagaggcagaccaataacatttacttcatgggcttgataagatacaactttaagatgactccaaatgttgcaaatcctcccaaagatgattcaaaatgaatctcccctgtgtataaagcccttccttatactgtggacagaactggactttccacttcctgatataatatggtagaaatgataggatgtctctcccgtgctaaaaatgtgttacatagagatctgtcttaacattatacattttagacaatggtatgtgcagtgaaaaacacaatttaaaaaaaatgttaaagctccatgtaaccaaactggagaaaaacctacttcttcagttgctttcaagaagtaaggtgctgtgttttaagagtaccaacgagaggactatgtgcaaaacacctgagtaattcctggaaatataacacttgcaattggcaaccagaaagaaaagcaacttcagttctctaatcacaaggaactaaattcaagagactttggaagtgctcaccactctgtagcaatggccacactctgcaaattcatgagactttcagcaaattgcaaaaccagaatgcaaaagtgtttttgacagaaagctgtatatgtcctgtctcttcacttaccacaaaagctatgatcagatagctttaactccaccaaagaagttttgtcaatatgagttcaaaatcatttgttcatgtcttttaggactttgattcttccttcatgtgtgtaaataaccaaaaatattgttcagatgtgtctggttgcacacaaacacatataaaggcacagaggggtgagtagcacaggtgagcaaatttttataccacatacttccatgtatgtttagagtaggacccaggtaaacattactaccccagaaggaggctcctgatttatccatcacttcaatctaatttgttcttcttgatcttatatgtaaatgcattattaaaatagtagaaaaattaattcatacctatatcaccaaagaaaatatctttaaaaatgtcccattaaaaggaaagaggcctaagacaaaaggctttttgcagagaatctttgactgtcttctttctcaaactttataatacagggttcagtagagaaatgataacaatgtagatcatcctacccatgataatattgaaaagcttaggggattgccgagggccacatagctgttttaacccatactgtgagaagaaaacagttgttgatgacaaaagttagataaaagaaaagctgggttgcacagtcttggatatctatggcctgataagaataaaggaaactagagagcatgcaatgaataatggcaatagcatagaaagttccagagatggagagcatgctcagaaaatagtacatgggtgtacagagatgatggtccactttaccagacagagtcagaaggtacaatgtcaggaagaaaatgaagaagacaagccagtgttgtgaaccaaagctggagaaaccttcaaagaggaactgagtcacaaaggtggagttctttagcattgaggcaggtggaggcttcaggaaacttggcaaagggaagaaaggaatgtcaagtcaagtcattttttcctgtattctagagtatcccagttttcattctcttccatactcttgacacttaaatcaagcttaaaatcttaatcaaatttaaaatttctgggtggacccatcaatcctatcccagaattaaacttctgtgtttttaaaatggtatttttcatctcttgtactgattatctcataacctacactcattctgaagccttcaattcaatttggccttgggtctcagccttgccaggtcagtctccatatattacattcagctacattcaactttttcatatcctcaataaaatttagtatttctttatgctctcagaattttaattagttgttgcatattttaactttttactcatttttgctgggatcatatacttctaacttaattgtgatcatcacctttatatggaaaattttccactcacattttttcatcttcttgcacctagaactagctattctaacaatcattgctaacactaatcatatattagttataaaatatgaaatgaatgatttttttcatttcatgacatacttcattaaaaactgaatatgttgtagcaactctggattttttttttatattctaaattttcaatgttgtttatctttttttactctctttggtctgtgaagagtagctgtgatatacaatttcttagatcttcttagttatttaccatcatcatcatcatcattgttatttgtcattgtcattgccattttaagctccctttacaaggttttccctgtgaatacttagttgagtagtcagttaatggttggggcatatggcacaccaacacctagaatccatcaactatcatcttctgctgatcaacctgtacacagattgtggtggccatgcaaagttctgagtcctcctcaagtttctacattttcttttgtgagttttaaaacatatttttatattttgaaagttccatacatttatacttgtatgttgaacatatagtttcccttggctctcacatttactcaggtttttgtagctctccattgaagatttttgtttctatacagctagagattcatggggtactctactgctgcccatcctatttcaagatctcccaattaaacttatggtttattagctgctttttcagaaacaagatacaagtctgagtactggtggatgtctccattcattcaccccccaaattaattaccatactgagccagtgtcagtgagtctgattattttcactcagcctttacagcaaataaagactgattcctctgaaaccaaggcactatttgtagagaaagttctcagcaacaataataaaagttcctaatcactgaattctggaaataaaaagattgtgattgactatttggttctggagaagcaactggagagctattccctggagaacacatttacccacccacccaccctatgtattcattagctgtctgtgttttttgttttgttttgtctagaatttggggcgtcatgaggtttaccttttctgcattagcatgtctcttgttgttatccttgccatatcttatttaggcagccacgctgtttacacttgtcccaggtgcaccttccataacatgtctaggaataacaatctcacgaggaacttcctgttcctctgtctcttatgctgtttccttgcccccttccattatgttccctgagcattagttttgtggatcagatggaaatgatcaaatggatcagtcagagctcgacaccacaggttagcttgttttcttcatttgatcagttctgcttttctataatggtttcctataattgttttctatgatgattctggtcttcatacgttgctaaggggagtttcttcactgaggcctgagattttcaaatgtttggaaatcatatgcatgtaagtaacatatgatcagattgtatctatatatatagtaatatatgatacacatacacacatatatttatatataatttctctgtgtgtaaaagaacaattaaagaaaaatggtagagtccatgaatttgagaaagtgttattggagtaacccaggggcaattggatgaaggaaagtaaaaaattaaacaattgtatttcaatttataagaattttaaaaatggattgtaagaactcccccagataaatgtttacagactcttgatattcccacctgaaactcaagatgatttcagttagttaattgcctttagtgaatttctatttgttaaagcagttgtttattacaatgcaattaaatttttatacatttgtttgctctcttcttgtccccaattatggatgttttatctattctatcttttgtcactgcctcctaatccatagctggtcctaagccatagtatcatcaacctggtaaatatatgcagaaattgattctaaaattgtgagacagaagttaacatagcaacatgtattatgtgtacacttagagtgtgattctgacctcaaagtggctacttgaggacattggaatagctcttgtaacttgtagaaatggttaactggaatgtggactcgcctctgggaatcctaataaaggaaaaggctgaagactatggttgaatatgtgtgaggtagccttaaataaactacctgaactctataggagtaagatctcaatgagtcaagaagcaagtggcacagtgcacctagcagatatatagagattatgtaattgatgaaaatggtaataatagtaattagagttatttgcttgtagaaaatagtttgatgctatttaattgatcatgatatgctgaaagcaaaaagagaatggaagacggatttttgcaatgataacaatttttaaactctagtattggtgaactaaattctgatttgaattactatataatggagaagaatgacctctcacctaaatctcttcctagagtcagctcatattcccagaactccacaaattgccatatcctcttgagtgtttctcttatgacattgatgtaaacccatgttattaaaattttttgtagccttacccaaagagaactgcatctatctattcatcagagtggcagatattaaaagataaaacttatgttcaggatataactagtcaatacatttttgaactgacacttatccctagataagaagcagaattctgcctgaaggctcttgagtgtcacattaagaaatggaatcttgtcatctttgggtctttacaataatcactttcctttggtgattcccaagcatatgtggtttattcatcacttctaaatatatcaaatgagattgacctgtggcaatgtattgcatatataccactttaccccatttcctgtgtgagtgggtgagccatgacactaccagttaaaagaaacattaagaacaagaaataactatgaaatgagtccagtgaagacaattcaaccactgagtttttattacccaataggaacactgtattccatacttacttgtgtttcaagatatattccaaggagagaaaaagccacccctttattcaagatctctactctaaaaattgaaagagactattatgggtctccatatgatgaaatagacactatactatgaagctgccacaagaggctaacattgaaagcatttaagatttctgtgaaaatccacactttccatagataatcactttttcaaaattgtctaatgtctcaggtgcgtaaaagcaggattctgaaacatgtattaagattccaatgatttactagcttttgggatctcaacaagccagtgtcatcacgttgtcttccaccagagctctagctccaaagcattcacactggataaccacagcagccccctaattgtttttctgagtcccaactggctactcttagattcatttcctagatttcaattagaagtttatacatgatgaatcatcacttccttagaagctttgctagctcaaaataaggccaaagttgtgcaaagccttgtgcatttacagtaccattagatctacatgatctctctctctcagcttcttgagcattttagagtgtttcacagaaaaacattggaaaataactttactagcacaatatattctctaaatttttccttctagtatttcatttttttccttctagtaatacccctgtgatattcttagtttgaaatttgcctgcctgtgtaggcagtatatactttaaacaacacgatctccaaaatccagcccatagtccacttcacaagccatgaatcttagagagctctctctggaacctcctttactaatggcataatgtattgtctggtgaccaaacagtctgtacagaggctgcatgtgtctagataatgcacctattttaaacttgtgcaaacacaggaatggtttaactacagttttgtatgctccttgcatgataactctaaggagcaagcactattattggttttgttgtgctagtatccacagccaacatacttctggcacataagtgcatgctcaataatatttgtttattcaataaataaggaaagcatcctcagacatagagtaatagacaattactttctttggcatgtttattctgggtttgctggtttgataacaaaacatgtttcagtttctgagatgcaggctgctcctgtgagtcactaaccaaaggcaaacagtttcagtctactaatgcccaagttcctaatgaggcccctgggatagggcctcacattagttctccggtgcccccagtgcccaggaatgattctcaagggaagtcttcagaatactggatttatagtcctgtttctctttctgggtaaaccctagacagcacatgtaggtttagggtttccagaggtgtctgctctgctgagagaccttctgaggccacaggatcaaacctttagcctggaatctgtcacttcattatgaaagtcctgctgacactccggaaatgcttacctgcttgccttgggatttttatttttttccactctggctttgtggagcatcccattccaggcctttctgtttgcaatctcaggcacaccatctcctaagaaaatatccatgatttccttttccaaggtctcaagaagtaagtgcttgttggaatgcaaaataaagtaaaaaagcgttagagaaatggttcttaaattttctggttttcctcaatctcctgctctctctttctaatgattttaatgatacagaagtttcagactttcttgataactttcacaaagtctggttgatacctaaagtgaaatataatattcttgcaggctttgtcttaaataatggaagaatcttctgaaagtcaagacaagacagcaaataggactgcctttgtaatcccagtgttgtcatctgcaactaagtgcctttgagtcttttgaggcagcaatgctgtgaggcattgttcttacagccatgattccttctcttctagaccaaacatcttgcttgaatattcatcctgaagaattttgttcagtgcaaatacttgacatgtgtagtcagatatgcaagggactcacacccactttgccaattactaaatatgttctggcaagaagtttattccactagacatcaatttttctatcagcaaattaagaatgatttgtgcacttgcagactaactttgaagatttaaatctcctagcctgtctacacccgagagtgcattttaaccaaatgttatttactgtggtttcattgtaactacttcagccagatctagttggtgtgccaaatttgttgttaaaacttttttccacctataaactacttttattccattttttatgatcagtcctgggtcaggggacttgtttagcatcttttcagaaacagtctgggcatctatatttgctacttccagaaaaaatatatatttggcttgctgtctgtgtgtgtgtggggaggtgggtgggtgggtgggtgtgtatgtgtgtgtgtgtgtgtctgtctgtctgtctgtctgtctccgtgtgtatgtgtctgtctctgtgtatgtgtctgtgtgtatctctgtgtgtgttaaatgaatatataatattgcctcatgaattcttttcacacttggagcagagaacaaaaaaggaacccaagtcttgcctgagcttttccttcccaccaggtattaatagctgggttgcaagtgtgaaacagagaccatccaaaccaacccctaacaaattgaacaaatctctatgtttaatagcaccctcttaaagcaaatatattatcttcctggcatcatcattctgtctgtccctcagctgaaacagaatttttcttcctgtattgatatttttcagtgacaaagggattagagctgcaggtcaggatatccaggcttcagagttacccttccaagtctgtgatactgggcaactcttttgtccttttaccaatgatttcttcacatatttaccatgtagctacttctgaaggagaaaagatgttgtaggcaaaagttcattcacttttctcctatcagtttttaaaacggagatgcttacctaaacatatactgaagactggaaatcaactctagatccatttgtgtcccttctgaattttaagtggtaagacaacatttacatcatctgtctgtctttcttcatactatccctttgtgaccgttctctcaggcagccttccaatttctccacttaatgagtgctgtagacattactgcttcctgtctatctatatatcagcttttcttttgcttggatgcttcagacactccatatgcctgcaatgcccctaaagataagaatcatgagctctacctctcacagctctgaaagttctgaagtctagacttttacctaattactgtgtcccaggtctgggtccccaaggcatagcttctgtggacatccaatgaaagggtaagtctcttcctgcggacaggaagtgctcaaaaacattccattgtgccctggttcatttaccaagtatttgtcaagggcataaaagaaaatgacagtaattggtattggctccagagatctggaactaaatcagtatgagtaatccaagaacccatttgaaaatcagacttctaacagtgggagccggagggtcttgaactgttttgcacagtcttcttcctattgtgttgctttgttcagacttgatatgagggcttttgccttattgtatctttttttgtgctttgtgtctgttatttcttggagcactgatctgttctgatgaagaaagaaatggggagaaggtatggcaaagagaaggggtagaggagagaagctgggggtggagggattgtaaactatggtcagaatatattgtatgagagaagactctattatgaattttaaaaaaaagaaaataaaaaacaagtaaacaaataattgcaatcacatgtgacaaaaataataataagtcaaataataaataaaatgtcaagaataatgctcttgtgtgtatgcatattaccattagttgttcatccaacaaaataacttgagatttgagtgacctgactccacagatcaatttgagattaggtgaaacagtgagagtattgtcttagaattcatagatgtaatcatttatctcacacttctttaagatggttcagtaggttttgaaatgttcttcatagaggtcttcattaatgagtacttgatatgttttgaaataatgataaatgatacatttcctggatttaatttggtaccagtttgttgaatacagaaatgcagggaagtttaacattataagctttgtgccaaaaactttgctgaggtctcttaataattctgatagcttgtcagtaccatctttcgaattttctatgaatgcaatctggaaaaaaaggccagttttatttcttctttctcaatctttgaatctttaatttctttttttttgccttactgggatggctagaatattcaatataattttgaaaagaagtagataaagccatcacatttatcttgttctaaatcatgaggaaaacccttcagtaccttggcaccaagtataatgttgactgtaggattgcttcctgcatttatcagttgagagaagatattttattctcaactttctataggttcttctcaagtgtaaatgttgaaaaaaacatgtgtttgtagcaactcaaataattatatgacttcgtcctctttaaaatagtttttgatgaaacatgtaattgaaatcttaattttaaacaattttccattctaaaaaactttgtcatttaacattttatgtactgatagatttaatttattaatatctcatgcaagaatttgtctatatttcagaggcagattactaccttaaagatgtagtctatgataaggtaacatttcaactttgttaatattgatgtttttaattgagtttcatatattttccattgagaagaatgttttcttttatttttgagattataattatgccatttctctcttttctatcccacttccaagtattgccatttactctgccaattttctttaaaatccatggccttttatcttgttaattgctattatgtgcatatatattcctacataaacctgatcagtctgtatgatgttagttttgcgtgtgttttctgggaattctcttttctctggagacgactatgtctctcagcattcttcccttggttgtgactccttgtgtatggtgaagccttgtgccccactgccatccattttgacacatccattagtgtcatccttattcattcatctcatgtttggacattcaaattaactgcaacttcatggcccaaatctcacaacacactgcctaatcttactctgtctcctctccagcaatgttcagtgaggcttgggttcatgagtgttttgtagatgtatccataggggctggattttgactgcatatggttttcctacctgagaactcgggctgccctctttggactgggccttcttacatcaactaagaattaagacagtctcccaaagacatgaccacagaccaacttaacctaggaaatgcctcaactgaggtttttccttttagatgactctaggcttttcagaggtttggtttatttgttttctattagttttttgagaagttcatacaatatgttttgatcatttctacccctccccaactgctcccacatagaccagatttgtatccttttaaaagtccattttgtttttgtcatatcctcagatgtctgaccatctacttaagtatgatcaacttaacagggacaacattaagtcttaaagaaaactgattcttcctccaagaagctgtccatttccaatagctccttttggggggtggagtttcacatatacctccttctctgcgttgagatttggcctgacctaggttaaggattgtgcatgtagcaattgctctgacttttaatgtgcagctgtagatatctgtgtgaatcccatctacttcaagtagactgttctctgatgagggttgagatatgtgttcatctaagagtataaggataagtcattaggtgtcactttgtatatagtatgtgtatactaaaaaatgattgctgttggtcctcccctagtttttagaacccgaccagacacaggatttggctcaacaatagcagcaagtatacattttctcaattaaatattagcggctaacttatttctaggaatgtaaacattttgttttattaaaaatatattgaaataaaattgtgaagctgcattttctctttttagtctgaatcttctctaattatgttcctttaattaaactaagaaagtttacttatgtattctcttattttcttggtcaatttcacagagtcctacattcaaacttaaattatttacctttatatgtcttatcattttattcttctttcacactattaccatctaattcttactacttttctttctactttttgcctttatttttatagctttatgagatggacattctgctggttagtattagcctctttttaaaataaatatcttaaaatataaatttagctctaataatcttctatgaatattatataagtattggtatattattatttcattagtgtttggttctaaatagttcaaagttatcaccatcagctcttgtaaccattggttagaatgccaaacatggacttttttctaatctacctattgtttttaatttctaatttgattacactctactaagaatgtggttaactttttaaagataacctaattttaagaaattttctttatcaatttcatggactacaggcaattatttctataatttctaaaatggaccaagatgtacttaaatggaatgctttcgggtttcttaagtaaaatgaattaaattctatctttggttctagttcaaacacccagtttatcaattctgaaggaatgggctggtcattgtttgttctgtttttgttttcaagacctagtttctttgtgtaacagtcctggctgtcctggaatgtactttggagaacaggctgacctccaattcagagatctgcctgcctctgcctcccaagtgctgggattaaaggtgtataccactactgcccatctttgttttgtattatttgttttaattttgtgtgtgtgtgtgtgtgtgtgtgtgtgtgtgtgtgtgtgtgtgtgtgtgtgtgtgtgtgttgttctatttgcaagtccacatgtacacacaggcatgtgtgcacctgtgtccttgtggagaacagatccactttgatttgtttatttttttaaattttataacagagagtcttctattggcctggaactaattgagactagtctgactggccagtgatccacaaagatctgcctgtctccatcttcctagtgcttggataacaagcatatggctccattagagcaactttcttgggcagaagatgggagtgggtgggagacccataagcaaagcagacatcatgcagagagagagagagagagagagagagagagagagagagagagagagagagagagagagagagaacaaattggaggtctgaatcaggtttgtaccctcagaggggcaaagataacccatgaaagaggagatggaaagattacacgggtcagaagggatagaggctaccaggagaacatgacccaatgaatcatctaagcaggatttatatggactcccagagactgaagcagcaagcatgacacctgcacgggtctacaccaagtcctctgaatacaagttatgacacttagcctggtatttttgtgggactactatttgtacacatttcctcccatattgttgccttgtccaaccttatagaagggcttttggcttgtcctgttgtatcttcttttgttctttttagctgtcatctcttagagacctgacttttctgaagaagaaacagaggggagtggaagtagggatacaagcggatggggttgggagctggcagagtggacagaagggaaactgtagtcaggctgtattgtatgagagaagaatctattatcaataaaccaattttttaaaagcacacgttatcataactggcttttatttatgtgcttttaaaacatacgctctagtgattgaacttagaaggtcatgctttggagatgacagcattatggattgaacttctctacatctccatccatgaatttttttttactgaatccgcaatacaggatcttttctctgcagtgtaatcagggtcatctctggcactaagacatagtgttcaccttctttttatctttcaggtttgagctcctcaatgaagagaaccaacttcacaggggtgagagagtttgttttccaaggtttctccaattaccaagaattccacctcacactctttgttgtcttctttgccctgtacctcctgactctggctggcaatgtcatcatcgtgaccattatccgtattgaccagcaccttcacacccccatgtatttcttcttaagtgttctctccacttcagagacgttctattccctggtcatcatcccgcgaatgcttggtagccttgtgggtctgagccaaaccatctcgctagagtgctgtgggacacagctctattttttccttggatttggaatcaccaactgtttgcttctagcagtcatgggttatgatcgctatgtggccatctgcaacccacttcgctataccatcatcatgaattggagggtgtgcaccattctggcatcttcagtctgtgctacagggttccttctctcactagttcaggctgtgtccattttcaggcttcccttttgcaactcactgattgaacatttcttctgtgatgtccgacccatgttgaatctggcctgtgaagtgccagttgtcaatgatatcttgacattagttctcaccctactggtcatcactgcacccgccactttcctattcatctcctatgccctcattatctccacaattcttaagattgcttcagctgatggctggaagaaaacttttgccacctgcagttcccacctcactgtggttgtgatccactatggttgtgcctccattgtctatttcaagcccaagtcagagagcaccagggaccaggaccagatgatctcagtgacttacacagttataacacctctactaaatcccgttgtgtatagtctgagaaacaaagaagttcaggatgccctgcgcaaagtgatgggtagaaaatccctatcatagttgctaatttatgtccaaataatttcatctttttcatatggaacattataagtaaaattataaaaccagggtctcatgtgattagaaatctcatatttgataaacagggacaaggccaggacataagaagagttaggagtcagcctccaataattgtgttttatttctttaacctctttgttaacataataaatataaaggtcacttgcaaggcctgtgcacagacagtcattggccctattccagaagataattacaaggtcaaagtatgatcttatgttcattttgagcttaaatttaaaagaaacaatctatttcctgttgaattataaaccacacattaaacattactcaatggaatattctcttagtgtaaattagatgctcaagcaagtgaagagtaggaaggatatgtacagacatctaactgccttgtgttttaataagataaatgcaaaactaaagacatcttttaagaaattgatttgggataacctaaaacttcctagacagactatcttcacacagccacacatggaacaccaagggaaatccacatttctgatcttcctctagtagaactcctaatgaaagggagctaaggaaatgtcatgaagagggaaggagacattaaatggaaaagttttaatcagcatagaataaccataagaggctggccatatcacctgaatgcaaatgacttggtctattcattgcttcttattattgagaagccagatggaggagagggctttctggagctgataataaagtcatccttcatagaaaagaaattttttaagtctcaggaaggaagtggaggtccttgagggagatgaatgctgagaagtctgtgaaattggtgaagcaggaaaggttacgaagaaatcgtctgagaagttcctgagagttgaatcaaagtgagagatgacagggtgaggagggccaagaagaaaagaactttagaaaacgtccttctgattgagcctccttcttccccttgtaaaccaagtcaccaaggcaaggaaagggaactaggtggaaactcaagccatgataactcctgtgtgaaataaattagatgattgaattactgaggaaaaatagaaatgtaaatagtaaggaattctgacatgaagacttctataaaattcaattatctgagctagaaatgaaacaatgacagactatttattctttctttcctcaaaaattgaaaaaggagaaaaatgggggtaaattttagattcaatttgtgagcaaaaagcaagtgatgaataaaacttagtgattagcaggtacaattactgatcaaatcaaagtattttattatattgagaaattaacttcagtatacaaaaagaacatatgagtacaccttattctccttgtaaaatgttgtcaaactacagaatatcaaataaaatatccaaagctatcatgcatgtaatatactatgtatgcaataaataaatctaaggaagttccatcctcctatctgcattgtcactcagaactcctaatacttttgatggaggaaaaattacctagatttttttatgtaaacctagtcagttattgatgaataatccatgttgagtaatgaataaaagtttagattattctctttgtttttcttctaatttacccccccaatgccctatagcaaacccagttctaagcaatggttctcaccctgaaggaaaatgagcctcatccatgctcatctctacctctgtttgctagagctcaggaagatacatgacccacagtcaaccctattgttatgcattgagagaactttggtgatttcatgtactttcaccagattccagcacttcatatcttgtttgcagccattctatgtccaccagccatccatcagcctcttataatcctaaatttttcatctctatttgtggtcctaggatgtggtgaactagagtcaacttggcatcctcaaaccaaccatctaacaccacacttacctacctccctgccaggactcaagactttctgtgcagcttctctggaaagtcagtaacgttcacattcctctgttacaataaatctttccaccaaaagccacctaagttctgcccgccatgtggatggacaaaataatacacagacatattaggtacaaatgctgcttggccaatgactaacctcagtcttaatcatcataaatctatatattttattaaacttgtgttatcggacgccttccattggcattgaccttgccgatggatcatatcatgccgctggaggaagagcagagtggcaaaagggggtacttcctggttgtccttccttaaatatgagtctccatgttatgtcacttcctgcctggatcaccacttctctactacatttcccagaatcctctttgactcctagtcctgcctaacttgctgcctcatttgccaaacagtattttatttatcatccagtaagacaaacacatacacagaagcacttccctcatcactcctctgtttcaaggactcctgtctgtccttgatgagggcatcaaggagtacctgggggcaagggcaagagtctgtcttctctagtatcccactaactacaatgaagtcttcttcaaagttttttgtctttatgttattcaaacagaaaaccctgaattcttctcagcttcatagttcacattttatgtttcacacagaatatattagtgctcatattttgatattcaaaatcattctctccaaactacaagaggctctcctatctagaaaagtttgctaaacttaaaacctctttcagtttcaattctaatgttttatttatgagttttggcatgcagttgactttctctctggattcttttgatcttttccaggggcaaataatgtcccctagaacaatgtggaataacagtagccactggaaaaacaggagaagctttagattaccacccacaagatgtcttcccagagtttgtttctttggaaattcagaaatcatttacttttcatttggaatattcaataaaaagttcctctcataagctcactgctcttgaattaaaaatcccattgttaaagtatagctctccagtagtacccaagtctccatcagaatggaattcaaatctcctttcctcgaggtcaatcctgtctgccagccacatcaacgtctgatatgtacagtgaggtaggttttccatctttctagttggagagagggccttttcctgtttctgcattggtctaccacctccacatggccaatgtgtgcattggcctgacagagatctttatcaagctgaggtaattaccatatattcctagctttcgtgaagtttttcttaaaaataagtggtgggctttgttaaatgttttctctatagtcggttttataatcataaagtttctaatttaaaatggtaatgtgatgaataccaatccttaatgtttgaaaattgatgtagctttgcattcctggaataaatccaggatggtctacaattccttttatgcactgttggataattttttttattattttgctaatattctgctgaagatactttttataagtcacaagatagaattttctgatgaattagtttgtctttcaaggttgttgaaattataattatgaagttaaactatttttgcattaaattttcataggtgatggaggtattctttcctatttatggcacttttggtttgtaccttttcccatttatttttggtcagttttattagatacttattaatttaactcatcatttttcaagaactttattaaatgcttttctattagtttatttcttttttacaggttttaaatatatttttatcttttgcttctgttcatatctttattacttcctcctttgtcctgttggaaccttctttatttctaccttcttggtgtagcaactcctgtcattgatttgtttcctgctaaaatactcatttcaacattgtaaattccttcctgtatcactgttttaggtgtgttcacatgttatagcatgctgaatatttttattcctgttttgtatttaatgtttccataggattttgtaaagaagtatgtcacctgacttccatgttgtttagatgttttgcctgttgagtttctgttatttgtagatagtttgtatcctggatatttttctgtcatattaggaaatgctgactactatgtaaatgtcttattttaggagatagtcacctagtttgcttgtcctaattttgtgagctatggttcttgtgatacttttacttctgagtctttttctgttattttggtctgcttgtcccctttggtgctgtggggacatcccatgtactctccttatttactcttattctttttcaatcaacattttgcataacagccaattatctctcaaaaactaaaatcctatcatgccttcctttcagtaaaatttatccaatgtagtttcattttatataaaataaagtctactttcctcatgatggcctatgtgatggttggtctttttgattgatattttttatttattatttggcaatttcataatacatatactatatctcaattatattaattccgttacctgtgttcccccccactcacccctgtggaaccccttcttcccaacaaatacccttccttctgtcatgtctttcttttcaagtggcatgctgagttgaattagagttgtttgcataagcatgtactaactggaacacgggccacttctcagtagctacaccactatagaaaatgactcccctcatctggcaacattaacagccaatagctcttcagggaggaatcgtgcctcacagactcctcctccgtccctgctggagcattaactacatcagtgctgtgtaattgcatatgttaactatagctgctgggtgttcatcagtgcaacaaccttgtcacatttaaaacataacttttcacagcactgctctccatcctccaacttttacactatttccaccctcctcttccacagtgtttcctgagccctgtaggagtgataggaggtacccagtttggggataagcatcacttattcccagcatattgacaagttatgagcctctgcattgcccactgcaaaaagaagtttttctcaacaaggctgagagaggtaattatctattttccttgggaacttttgggcttgtgtttggctcccatcactgtaaacaatgaaagcagagacacatgaccgaaatttcagtagtcagcagatggaggtaagaggaccagaagtttaagataatcttaaactacatagtgagttcaaaggcagccttggatataggaggtcatttcagaaggaaaaaaaggatgtagtttgtggctgaatgttgggaaatttcaataacaagagactaagggaacaaacaccaaggggagggggggtgcagaaagccaagggaaacaagaaagtatctgtttagacattccatgagcaaagttttcaagagggaaaacttgatcaactgcatcaaatgacaaggatggtgaatcagaattgaccattaaatttggaaatataaggctaaatttagtcacttaggaaacaatatgtatagatacagttaaagctattcaaaagtgaataggccattgagaagttactccagatgactccatgaataagagcccttctgtttaagcctgggggcatgagttggattagcatttacccaaaatgccagtcacaggtacaggctcctgaaaccttggtgtttgtagagaggaccagagacaggaagacaattggggcttgctggctgtcagtccaaatgtaaattcagtaagaaaccctggttcaaaaagtagtgaagtaaagtgacagaggagcccaactccctgtgttcacccatacacttcacacacacacacacacacacacacacacacacacacacacacacacacactacacatcacacatacatcacaggtcacgcactacactatacatacattacatatcgcacacacacatatcaagcatatcacacacatcacacatatcacacacacacacacacacacacacacacacacacacacatcacacacacaatacttctaaaataatgatcagggggcataaattgacgacactaatacagttttctccttcatacagtttttctgtaaaagggaacaaatcaattactgcctaactgaagaggaatgtgggtcaaggatgattggttttgctaagttttactagagaacttatagcaaatgcatgcatgtctttttaaattagtctagcttggatcctttttggcgtgacaaagcattgtccccaagtaaatggatgtgatgcatttctgtttacaggctgcaggccacaccattaagcaaagtcaatgcaggaactcaaagcagaaactgtggatgaaggctgctgtgggtttgctttccttggcttgttcagctacctttcctatgctgcccaggtcattgctggctaaggtcactgcaactgagggcgcccctttcccaatcttgtgaccttttcagaccgaaatcctgccatgtgaagccaaacctctgcttttcttctggacccctacaatcctacaactgagcctgcaacttcaataatagtgtcttctggactctcttcagagagatgctcaccctatcacacagaggaagcaagctagtaagcaaagcattcttccatggtcactgtttcaggttccagccttggttttgcttgatgtcatattacagcctgtaagatgaaataaatcctttcattccccaagttgcttttggtcagtgttttatcctagtgacagagaagcaaactagagcacaagtttgtaccctagtgcccacatatagatgtttacaaagtggagtcagaaataggttgataactggtagtttattggggaaaagtattcacacaagggagccagtgaccaggtttgcacctgagcaggacagactcagaaaatgcttcttagtcagctcagccaggagaaagagcaccgcatgctcaattcccttcttcttaaacccttgttacataattctgaccacgcccatttgggcgtgatcagtggtacttctgaatcatggtttctccctacacccacatgccaatctgatggaggctattcctcagttgagattctgtcttctcgggagtgtcgagttgacaacaaaaactaaccaagatgtaaatgaacatgatctaatacaaatttgatggcaccaaagacacaagggagaatgactgaggggttgtgatgggtaacaatgtggcagatggctttactatagaaacagagagggctcactcatagtattagtacagaaggtttaattttgaagcagagattcacatatacatgaggtaggtataatgattagaatacacagatttcttttaattgctttgaattcttaacaaaataaaaaaaaagttgtctactgaagaaggcaagaggatgaaaggtgagaaacagcagagttgctcagcaacatcgataaccacttaatgttaaatgtcatgaattttaattaagaccagctattatccagatttttttcttcccagttaagttcagctacatgggtgctctatgcaagaataaaatttgatttaaccaagcttggtattgtagttggtaaacaggggcatagaaatcaatggtaaatgcaatgcaacgattaaaatgatagtctattggatttacacagagaaggagaaaacgtcagggcagaggagatcctcaaagtgacaaaaggcagacacagatgcggaatgaaggacgttgcaagatgtgctatcatttagtttaggatgccatagggaatgagcagaaaagagaagacatgatataattggtcagtatatgggactagccaggcttgatggctcagatctacagtttcagtactcaaaaaggcagaagtcgaaggattgcttcaagttcaaggccagcctggactacagagtgaatgagacctcatctcataaaaactgaaccaaccaaaacccaaaacccacaagaataagaaacatgcattttctgcataaaaattcttcaaactctactcagacttttaatagtagataagtacttttaaatcttgccttgcaagaaagcttcatttttttattttttattttttattttgcaatttgagatgatgggtctccttaaatttctgagagtacaatgggaaactaatgaaaaaaaattctaaagaagcataatgcgaggaacaccaaatacagaggcataaggtagtaaaagtatgagaagtatttacttttccatatacgatgccgagaacccccccaaaaaatatatatcaatttggttttaagaagttcacttaactttgtggctcacaaccaattaaatcttagatgagtcaaatattaaagaatgaaaagtggggaaggcagtatgtgtaactttaaaaactaatctcagagttaggagggccttgttaagcactaataaaaatgcaaaagcaataaagtctgatgtcaagagataaatacataaatacaatactgacaaattttcaaatccataaacctagtaaagatgacaaatggaagaaaaatatttgcaacatgtataataaagggcatattttcttatcatagaactcttataagaaaaggacaaataacacacagtatgaaaaatgaacaagatatgtaaatggacattttcaacaaacgaagcacagaatcgaataagcatataaaatgtacccactacattcacaaagaaatcaaaattcaagtaagaaatataccatctttgcttctcagtttgccaaaatttaaagacatagtgatgtgcaagactgatggaaaagtgtccaagtaccttcctcaatactgcagaatgtgtgaccagatacatctcatcctggtttcagtgtggtgggaggtgttgtatttaatgtatgaatcactgaccatggaattttagttttagcaatgtatcttataggtgcatactccaagaagtggacagttacaaacaagcagtgagtctttcttgtgttcttcatagttagggtaagccaggtcaagtgtgatattgttagaagctatgctgtgaaattgtccaaattagtacaacaaacctttttgtagtgatttgtaaagacactgggcatgtcatcctttatggaaaatgcaagtaacacagcaatggatttaaaaacagcacatttgaatgacaaagaaaggtcacacagagacacacgttcacacatacggtatcaacacagagcatttccaaatcatgttcaggaaaatttgcttctcatgtgacagggactagcagcttatgaattacttgataatatggaaagggagggcatcatgaagcactctgagatattattttgaagttggcactccaagtatatgaactcgggatgtttaaaacattttcgggaatttcatccatacacgatttctttaacaagcccaccctctgttgcctcccctctaactctataccctgcacaacttcgtgtcatctttttttaacccactgagtcctcttagtgtgacctgtatgcgcatgggtatagagatgttcactccagcatgagcagctttttcctaaagaaaactgactttcttcaccccacccccaccccgagtagctataaagtaaccatagctccttgcctgagggtgggacttcacgatcccccatccatgctggaattatgaatggcttgattctgcacaggccttatgcatacaactaacacctgttatgacctcaagtctgaactgtaatgttcagaacacaccattttatagcagtcccctatgaaccccagatactacactgtttctgcctcccttctgcaatggccccaagcctacagagaaagactgtgtgtgtgtgtgtgtgtgtgtgtgtgtgtgtgtgtgtgtgtgtgtgtgtgtgtgtacacgtgtgtgtccccatatatatcctatttagggcagatcactttaaactcttattccctgcacattgaccagttgttaatcattgttaatcactgtccactaataagaagcttttctggtcaaggtagagaactgcactaatctctatatatgaaaataactatttaaggatctggaaagatgcctcaagggttaagagcccttgtgactcttgctgtggagttaggttcagttcccaacacctacatagcatcacacaatactctgttgttgcagttccagaggaccaaagccttcttctggcctctttgggcatgccttctggcctctttgggcttctgcattctcatagtgcacataaaatcatacaggaaaatgaaatgcacacatatatatgtaaaataaatcaatcttttgaagagataagtatttaagattcagtgtaatactacgttcattttacaaaataatagtagtagttctcctttactgtctatggcctacctagctaccagatcttggcccagtgagcagtgtcaggaatgacttccaagtttagaaatcaaaaagcgactagttattctcataatattcacacaactattatagcaatcacatttcctgccaaactacttcttattgtaccttgtaggatcatatccaggtaagactgtccattacttttcttccaagcagggttgtatatagcacactcaggcactatgaaagctagccagcaggaatgacatttccaggttagtaccagcttgatttctccacatccaatgactctagtttgtgttatcttcagtgaagaggacttactacgagtaatgaaaagtaaccaagaacaatttcaatgtcctgtataaaattggtccatgacacaccactggtcaacaaattgaaaagagataacctacactttgtaatgggctctttgtttaatagcctataacatctgggagaggcataattcccacatatatattaaaggtaactccatttaaacttgtatgtatgtattttaggacgcttcttttatactgggttgccctgtgcattttcaaggtccttagtattagttatctaatcattgtacccccttgtttaccaccctaatttggtggcatgaacctgggagagcagggcctaaaaataaggtggactaaagtcttataccatagcaaactttattcagagcatcagacaatttatactcagagggttaagaataatcacacaaggaaggtgctcaatcccaagaacaatccacatgtgataaaaacatggttttccatagaagcacgtgaataaccagagctgaagtaaatccactcctctccaccacacctgggaggggaacaaaagcaaaactcattccaagaacaactcgtggtatggaggaacagaggttgcaagattcttgtcttgtttacttggaccttctctcacaaggtctcagaaatctcctcacacttcttcattcatggaccatgttaccacccactctactttaccctgccctccccattctcttccctatttaactcttcctgccccattcttttagtttcccacttgataacacccatgttccactattccatctcccttggaatctcaccaccatatacccattttccaatttcttgacttctacaggtgccctaatttaaacacaaatagctttttgtgtgtgttcattcttttttcgggagttttattagaaaggaaagagggaaggaaagagagaagaggtaaagagacacagagacagaaagaggacagaagagaagaggagacagggaaagtcctgtctgccccaggggaacagcagaaaagagagcacaagtgaactttttgttattacctttttttttttacatcctgatcacagttttcactccctcctctcctcctagtccttcctgcccactttctttctgctccccaacccactccttctcattgctgttcagaaaatggcatgccatccatggatgtcaaccaaacatgtcatatcaagttgcagtaagactaggcacctccccttgtgttaaggttagaaaaggcaatccagtatgaggaataaggtctcaaaatctggcaaaagagtcagagacagctcacacttccactgtcagtagtctcacaagaagacaaagctacacgactgtaacatatattacagatggcctagatcaattccacacaggctccctggtttagtctctgggagctcctatgaacccaggttagttgactctgtagtttttcttgtggtgtccttggccgctctctttctccctctcttctgaaggattccctgagctcagcttaacattgggctataggtctctgcacctgtttcgatcaggtgctgggtgaagcctctctgatgacagatgggctaggctccaatctttgagtacagcagaatataactaggtgccattactttaactttattttgccagtcatgtttggttctatcctaggtctctaggctctccagtctctgggtcctagcactgcagacagattaaagagacatatcttaagataaaggtattgccacagtccaaaatttagacagtttgttgttaatttgtttcattttatttttcatggaaagagccaaaacatggttatataaaagtggcaatgagactggagaatctaaaatatctgaaagacacttaagaaggtgttcaacattcttagccatcagggaaatgcaaaccaaaacaactctgagataccagcttgcacttgccagaatggctaatataaaaaaaaaaaaaaaaaaaaaaaaaaaaaaaaaaaaaaaaaaaacaccaatgacagtttatactggagaggatgtagagaaatgggaaaactcctccactgctggtgggttgcaaacttgtacactttgtaaatcagtatggtggttccttgggaaaacgggaatcagtctacctcaagatccagcaattctaagcttaggtatatacccaaaagatgcacattcatatcacaaggacatctgttcaaccatgttcatagcagcattatttgtaatagccagaacctggaaggaatctagaagccccacaactgaagaatagataaagaaaatgtggtccatttacacagtgcagtactattggggggggggcaatgaaatcttgaaattcacaggaaaatggatggcgctagaagaaaccatcctgagtgaggtaacccagtcacaaaaacacaaacatggtatgtactcactcatatattgatattagacatagagcaaaggattaccagcctacaatccacactgccacagaaactagtaaacaaggaggactctaagagagatatacatggtaccccagagaaggggaaatggtcaagatctcctcagcaaattgggagcatggggcaggggagagggagttatgagaaaggggggggaagaggcggggagaggaggacatgagggaccaggaagattgagttgagggaagaatagaggagagcaagaaaagagatatctttatagagggagccattataggtttaaagagaaatcacacactagggaaatgtccagagatatacgaggatgaccccaactaacaatctaaacaatagtggagaggctatcttaaatacccttctgctataatgagattgataactaccttatatgccatcctagagccttcatccagtagctgatggaagcagaagcagagaaccacagctaaacactgagccaaattcctagaatccagttttagagagggaggagtgatgagcaaaagggtcaagatcaggctagtgaaacccacagaaacagctgacctgaataagggggagctcatggaaccagattgacagcttggaaaccagcataggatggaaccaggccccatgaatgtgggtggcagttaggagacttgggaagtctatggggcctcaggtagtagaacaatatttattcctagtgtacgaatggacattgggagcccattccccatggagggatactttctcagcctacacacacgggggagggcctaggctctgatccaaatgatgtgacagactttgatgattcccccatggaaggcctcatcctatctatagagcagaagaaggatgggataagggttggtggagggcatgggaggatgggagggagagggaactgggattgatatataaaataagattgtttccaatttaaatttcaaaagtaaaaaaaaagatttaaatgagaaaaaatggcaatgagggtgcctggcatccagatctttgtttctgaatatgatgcaaaaaagatgctagatttccttgaaggaatgacttaataaagtgccagagcagggaatgtacataaagaagccaaagctcatcttggtgtgggatataaacaagcactcaaagaaactgaggagaggttcaaacaaagtctaagataagctgcagccattctcagtggacagctctgtgttgatttgagcatcagggtgaagaaatatctaatgctgtttcaaacagctggtgtcacagcacctcacgtgcaaacccaggagagaattggtagactagaagtctccaagtaaagaaaacagtaagatgaaataggaaatagaatttaatcccaaactgtggtggggtgtaaagtaaattaataaatttaatttttaaaaagtaaaaaaaaggcaaaaagtgggagcaaatacttgggataaataagaaggataggaattaaaatactcaaaacattgtgatttctggaaataatcctagaattggatttttaaaaagacatttcaacttataagctgtagtactatcccagaaattaaaatataacattgaatgtttaaaagactcaagtcttagtgaaccatatatatatatatatatatatatatatatatatatatatattggctattgtatcaaaactatatatggtgaacaatgacatattatttgggcattcagacatgtgtaacaatgacagtaaatgcatacaatcaaaataaccataatacaggcagtaggaaccactggagcaatgagagtttctggaacaagaagatagggagacaggaaaaaaaagctggaagtgcagcttcctagttgagctgagtgacaggtttccaaatgtttattttattgccatgcttttcatcttacatgttttaaatgcagtgctctgtaagtaccagtgttacattaatattataaatggtgtttataaattaaacaaacaaaaagaaataccaagtacagaagcagagtctactagtgaatgtgtgcacctacgcacaaagcgctcctgctatcttcttgcccactgaaccaaagtgttgctcactttggaaattgttcatgaacttttatttgccttttaatgtagaccattaactgtttactagcatcattttgttctctgtgtctctgtgtgcgtgtttctgcctctgtctctcgtttctctctctctctctctctctctctctctctctctctctctctctctctctctctgtgtgtgtgtgtgtgtgtgtgtgtgtgtgtgtgtgtgtgtgtgtgcgtgtgcgtgtgcatgtgtgtgtccacagagaccagagacattggttcctcctggggccagatggtgagcctcctggtatgggttctgggaactgaactcaggtcctctagaagaaggtacacattcttaactactgagccatctgtccagcccccaatatttcattttcattcatctttgaatgtattgcaataaaagcaaatgccagtaacatttttttttgcatttgctatacactgttaattttataatcccctacttttaaaggtaaccagaaattcagtgtatatagaaggctatgaaagacaaaagagaaactattgcacaccggggcagttttcaggattacaatgaattaagaccattatgtatgtatgtatgtatgtatgtatgtatgtatgtatgtatgtattttataaaaatgtagaaggggtaactcagaggataagcagcatagttcaattaggagacatttgctagagaaaattcagagtaaaatttctctaggggaataaaggaggggcagggaaacaaggttgatggagaccccaaactatgctcaccagtcccagtgtgtttatccaggtgtctgctggccctggggtgatgtcctgaacaagttgttttgatactttgttcttgtcgcctcccacagaatattgtcttatcgtttttatctctaattttgattcccataggataagaagaaagagaaagaaagaaagaaagaaagaaagaaagaaagaaagaaagaaagaaaagaaagaaagagacagagacagagagagagacagagagaaagacagagaaaaagagagggggaatggagaagggaggaagaaaggaagggaggaagggagggagggagagagggaaggagggagggaggaagaagacatagtcaagaataactattttcgtataaacaggcaaaaagagaaagaaaacatctagcatggagcagtgtccttgtctatgtgagaattgcaatttcctgtaatctaagactttcgtctagatctcactggggttttgtaaccatggttttccagggctcaactgtataaaaatagaatatttatttaaataaaataaaacctgacaaataagccacatttttgtctacatgcagtgaaggctgcctcaaagttcacaaagcataatgctacagagtcgggtgaacatgccctgcacataacgaggtcccctggtatttgacgctcccctgtcccaaggtgactcttggggtgcttagggaagagcaccccaaatccctgagagttgttccttcgagaacatttcttggtcatcaaaatctcctcctccagatggaagaagcatcttatacccaaagagccccccctccccgtgcctttcatttccccctccatccagagactgactcccaaccacactcaagaagccttctttcatgacatgatttgtaaatgtttgtgatccatggccacatctccagtctctgcctgtattatgatactgaaacacagaatcacagggagagaagtaagtgaaaatttagggatggcatcagtggttaacacaatgccatgtgtgaaataaaatacttaagttttcttgtaaaaggttcatgtacttagcagagaagggcaggggtatctgtgaatatctctttacttttttatgcattactttaaaagacctcccatcctagtaattgcaataaatcaggacttaccaggataaagaattaatcttcgttaaaaaaacaatgtgagtctgggatgctccttcttgtatttcaaaattcatattctagaaagacaagggatataaaggtgtataaagtgtttttacagtgacttgccacactacacacagggtcaaagaactttccctatcaagaaatgttctttggcatctaacataaaatttattttctttgcaaccttatctgatttcttccatatcgtgcttgtaggagctgaatccaaatattaattgatttttttataaatctttttgcagtttttctttttgaaaagtgatttattcatgaaaaatgaaaaagtaaacattttaaaagcaccaaagaatattacctttgaaatttacccaatagtaaagccttttgtagtgtgtcccatttgctttaattccagaaaaacatacttttggaaaaaatatatccttctactactgaactaattattttaaaagtaacctctcataattatacattggttagtaatagagatgataaagactactggaaaaaatgcactaccagtatgttttctaattacatgtttataatgaggtgcttctggtcagtgttctgatgacataatttcaatgttaaaatgtaacccaattatttatttgcttgttgctgccacagcatagtcatgagggaaaaatgtgacagaggttaagacatgatcccttccattccttgaagaaaaggtcactgtagtactttggctttctgcttcctagtgggcaatttcttgctggaacaatgatttgttatgattcttgaaggagacacccatgtcttgcattgcactggccatacagaggttgcagagtggggatgcacggtccctgtctagctgtgacagagacagttgcatgatgttttgtgtggtagaaggaacaatcaaaaggagtcagaagacaagtctgagtcttagtttaatcctttgatgtctatgtatgtggacaattcctaataaaacagatgatgatctcaaattcctcatctcaaaagaatcaacaatcttgtcctcatacaataaagtgaaataatatatgtgagtatcttttgtgatttctaaggcacaacaagatgctagcaatacataagtaaaaaaagcaaaacattctctgctacccacatatgcaaggacacatagatgggaccagggaggagaacaatttcacagagaacatgacttgcttagttttgaaaaatgactgacatctagggaagagaaaggtagagcagctttgacaggagcatcagagtcaagagaatagaatgaaaaagtaatctgtaagtgcagtagcccccattccatgaaaccttagatgctcaggagtaagtaggtagctacagcatctaggactctacatgacagcattttcaatgttttaaaagttctaacttgtagttaatagcattttttgtatgccaacagtgctgtgatattcttatcactacatccctataagggatgtagaaacgtgtcttaaggatgttaactccttacccaagatatgaaaacacatgacagaaaaagcaaacgatttacagcattcaactccaaaagccatgtaatttcttcatactgaggatgctgaaccagccccccaggctctacctctcaaaaaaaaaattagatggggatgggaatataaataaaaagcgacctgtggttgatcaacaacaaaaattttcctgcctatcaatatcaccctttttggtatcactaatatttttttcttcctagatatcatatatgatataatgaagaaacagaatcacactttggtgtgtgagttcactttccagggtttctctaacttccgtgagcaccagctcacactctttgttgtgttcctggccctgtacatactaaccctggcaggtaatgtcatcatcgtgaccatcatcagctttgatcgtcaccttcacactcccatgtacttcttcctgagcaccctgtcagcttcagagacggtgtacacacttgtcattataccaagaatgctcttcaaccttgttggcctgtgtcagcacatttccttggcaggttgtgccactcagatgttcttcttcatcactttggctatcaacaactgcttcttgctcacagccatgggatatgaccgctatgtggctatttgcaaccctttgaggtactcagtcatcatgaacaagagagtgtgcctccagctggtgtggggagcatgtagcattggtctaattgtagcaatgatacaagtatcagctgtgttccggctgcccttttgcaccgccaaggtagctcacttcttctgtgacatccgacctgtgatgaaactctcctgcattgacaccactgccaatgagatcctgactttgatcataagtgtgttggtgatcttgattcccatgagtttggtttttatctcctatatccttatcatctccaccatcctcaagattgcctctgctgagggtaggaagaaggcctttgccacctgtgcctctcatatcacagtggtcgtcatccactatggctgtgcctccattgcctacctcaaacccaaatcagagaacaccagggatgaggaccagctgatctctgtgacctacactgtcatcacacccctcctgaaccctgtagtatacaccttaaggaacaaagaagttaaggatgctttgtggagggccatgggcaagaaacttccctgatagtttggacccatttcaaacggggtcaccgattgattcctggattctctaggaattctcaaggaagacatggaagtatttccacagagttagcattcatgatcccattaagcagtgaatgggcaacaggaagttagaaccacttgaggaggggagaaacaagcaagcacgtctctcacaggagaacagcaataaaacactaatattgggaagtacatctgccatctggaaagcctgaaacagaatgagatcagaagagcagacaaaattaatgaggggaggctgttatgaggcggggataaaggtttttaagtacattctgtacattctacgatactcttgggggagacatgggcttccctttacccatgtagaacatgtaagcgtagcacttaattgtcctttatgggcaatttacagccttttgcttcttagacaccacaaataaaatggatactagagttgaggatatttaaaagctagcagcccatgaacttgtggatctttttcatggaagctccaggttatggaatttagaagttgatgttttcagggtcataggagaaaagtatctttggaaagtcatcaaaaaccatttagttaaagaagtggcaaccgcactcatataagcccttatcttgtgaaaatatacagcctagcgataaccaaggtctagtggcttggttttcaggctgcacctttatgggcttctatgaatttttatcaactaatggaaatcctgcatgttattatcagcatctactcaggcaaggcattcttctatgcattttgaaacaccagactgaagcagctctctttttaatacctatttaataataaccctaaagttatcagttccttcagccctcccttctaaacccagaaattcctatatgactatatgacaatcatgaacatttcttatgctccctgtatggactgtaatgtaaaatgtccagcaaatgatttattacctacacatactcatggctggagagctgttcaacatagtggttaatgtttcatttattccaggtggtatgtttctcaaagaccatatacactctttaatttaaaaactccattcaaatatttacattcctccaataactcacgcaagttcagtcttagagctgtacatttgggggattcatcgtgaaatccaagagaacccaaaaagaatttattctgtatctatttatttactcaataaataaaatttatcctcccttgtcccttcaacactatcagtcatagaaaatatatatttttaaactacatcaatcatttacaatgcaaggcagcagtttttagaaatcagtagaattcatgagaacatgaacatatacttctgtgattattttgcatatatgtgtatatataatcatatataacatatgaatgaatttttcaatttctctgatcctcatctgtaaaaattatgtccaaaaattcttgtcaaacaccagataatgataatgatacaaacaccagaaaggataatgataaaaattatttggaagtgaagaatagagtagagaaagaaaagagataccataatagagggggccattgtaggtttaaagagaaatctggcactagggaaatgtccagagatctacaaagatgacccaactaagaatctaagcaatagtggagaggctaccttaaatgcccttccctgataatgagattgatgactaccttatatgccgtcctagaaccttcatccagtagctgatggaagtgacaaaacagggggagatacttattttttattagttcaaattaggaacaagcttgtttcacatatcaactcctactccctccccctccactcacccccactcctcctgccccacccctgacttaccacctcaccccatccaccctccactccccaggcagagtagggccctcagcagggagtccccaaagtccaccacatcaccctgggctgggcctaggcccttcctgttgtgtccagtggattgagctctcaaaatcccttcttacaccagggaaatatactaatccactaccaggggccccctagagtacagaggcctcctcattgacatcatgttcaggggtctggatcagtcctgcattggcctcccagacagctgtctggggtcggtgcactcccccttgttcaggccagctgtttctgtgggtttcaccagcctggtaccaacccctttgatcttcattcctccctctctgcaactaagttccagagctcagatcagtgtatatctgtggatgtctgcctctgcttccatcagccataggatgaggactctaggatggcataaaaagtagtcatcaatctcattttaggggaagggtgtttaggttatcctctccaccattgcctgaattgtcagttcctatcatccttgtaggtctccagaaatctccctagtgtcagatctcttctcgggcctataattgctccctctaacatggcatctctcatcctgctcgcctctattcttcccgcaactcaatatttctgctcctctatttcctcctctcatcttctcctcctctcattctagcagctccctctcccctaccctcaggttcccaactagctcaggagttcctgccccttcccattcctggagtccatgcatttatcccttagagtccttcatgttttctagtttctttggtgaagatgattctaggctggtaaacctttgctctatgtctaaaaataatatgagtgaatacataccatgtatgtctttttgtgactgggttacctcactcagcatggtttcttctagttccatccatttgcctgcgaatttcaagattccattgatttttctgctgagtagtactccttgtataaatgtaccacattttctctatccattcttcagttgaggggcatctaggttgcttccaggttctggctattacaaacaatgctgctatgactatggttgaacatatgtccttgttgtatgaacctgcattatttgggtatatgcccaagagaagaattgctggatcttgaggtagactgattcccatttttctgagcaaccaccatactgatttccaaagtggtcttacaagtttgcactcccaccagcaatggaagagtgttcctttttctccacatcctctccagcatagaatgtcattggtatttttattttagccattctgacaggtgtgaggtggtatctcagagttgttttgagttgcatttctctgatagccaaggattttgagcactttcttaagtgtctttcagccatttcatattcctctgttgataattctctatttagttcttcaccccactttttaatttcattgtttggtgttttggtggcctgattcttgagttcattgtatatcttggaaatcagccctctgtcagatgtagcgttggtgaagatcttttcccattctgtaggctgtcgtttttgtcttactgaccgtgtcctttgccttgcagaagcttctcagtttcaggaggtcccatttattaattgaagatctcaacgtctgtcctactggtgtaatgttcagaaagcagtctcctatgccaatttgttaaagggtaattcccactttctcttctagaagattcagtgtgtctggatttatagtgagatctttgatccatttgcccttaagttttgtgcatggtgacagatatggatctttctgcagtcttctgcatgtctgaatccagttgtgccagcaccatttgttgaagatgctatcttttttttacactgtatagatttagcatctttgtcaaagataaggtgttccataggtttgtgcgttaatatcagggttttcaattagattccattagtctatctgtctattttttgtgccattaccaagctgttttcagaactatggatctataatagagcttgacgtcagggatggtgatgcctccagaagatcctttattgtacagcattgttttggctatcctgtgtattttgtttttccataaaaagttgagtattgttctttcatggtctgggaagaactgtgttgggattttgatggatattgcattgactctgtagattacttttggcaagaatgcctttttaactgtgttgattttacctattgaagagcatgggagatctttccattttctgatatcttctttaatttctttttttaaagactcaaagttcttactgaacaggtctttcgctttttttggttagcgttaccccaagatattttatattgcttttgcatattgtgaagggtgatgtttctctgatttctttctcaatgtatttatcatctgtatatagttgggctattgatttttttagttaatattgtatcctgctactatgctgaaagtatttatcagctgtaggagttccctggtagaatttttcgtgtcattcatgtagactatcatatcatctgcaaatagtgaaagtttgacttcttcctttccaatttgtatccctttgatctccttttgttgtcttattgctctagctagaacttcaagtacaatgttgaagagatatggagagagtggacagccttgtcttgttcctgattctagaggaatcactttgagtttctctccatttagtttgatgttggctgtatattgcttttatcaggtttagatatgttcctgttattcctgttctctccaagatctttatcatgaagggatgttggattttgtcaaaggctttttcagcatccagtgagatgttcatgtggtttttcttttacagtttgtttatatggtggattacactgatggattttcatatgttgaaccatccttgcatccctgtaatgaagcctacttgattcatggtagatgatttctctaatgtgttcttggatttgatttgccaatattttgttgagtaattttgcatgagggatattggtctatagttctcttttttagttgtatctttgtgtggcttggtatcaaagtgattgtagccatgtaaaaaaagtttggcaatgtcccttctgcttctattgtgtggaacaatttgagaagtactggtattagctcttgtttgaatttctggtagaattctgcagtgaagccatctggccctgggctttttttagttggaaggcttttgatgactgcttcttttttattaggggttataggtcaatttaaactgctaatctgttcttggtttaattttggtaagtgatatctattccggaaactgtccatttcctttagattttcgaattttgtggagtacaggttttcaaagtatgatctgatgattctctgaatttcctcagtgtctgttgttatatcccctttttcgtttttgattttgttaattagcatgctctgtctctgccttttggttagtttggatagaggtttgtctatcttgttgatattttcaaagaaccaactctttgtttcattgattctttgtaatgttttcctagtttctactttattaatttcagacttcagtttgattatttcctggcatctacttctctgtggtgagtttgcttccttttgctctaaagctttcagttgttctgtcaattctctagtgtgactattctccagtttcttcatgtgggcacttggtgctatgaacttaactcttagcactgcttgcagagtgtcccataagtgtggttatgttgtgtctacatactcatactcattaaattctaggaagtcttcaatttcttttttatttcttcctcaacccaggaatggtgcaattgggtgttattcaatttccacaggtttgtaggttttctgcaatttgtattgctgtttaattccagctttaaaccatggtgatctgataggatacaggaggttatttcaattcttttgtatctgtggaggtttgctttgctgccaattacgtggtcaattttagagaaggttccatgtggacctgagaagaaggtatattcttttgtgtttggatgaaatattctacagatgtctgttaaacccaattgggtcataacttctattagaccctttgtttctttgttaagtttctgtctgatggttctgtctggtggtgaaagcaggctgttgaagtctcctactatcagtgtgtgtggtattatgtgtgatttgagctttagtaatgtttcttttacaaatgtgggtgcctttgtatttgggacatagatgttcaggattgagacttcatcttgatggacttttcctgtaatgagtatgaaatgcccttcttcatctcttttgattggttttagtttgaagtgtaatttgctagatattaggattgctacacgagctagtttcttgggctcatttgattggaaaatcttttcccaaccctttactctgaggtattccctgtctttgaagctgaggtgtgtttcttgtattcagcagaaggatggattctgtcttcgtatccattctgcttgcctgtatctttttatgggcaggttaagaccattgacattgagggatattaatgtccattgattgttggttcttgcctgttttggatttattgttggtgatgtcattgtatgtggattttgccctcctgtttcttttttgtgtttggtaaaattggattatctattgcctatgtttttgtgagtatagttatcttccttgggttgaagtttttcttctagaaatttctttagtgctggatttgtggatatgtattgtttaaatctggttttgtcatggaatatcttgttttctccatctatagtcattgaaagttttgttgggtacagtagtctgggttggtgtcgatgctccattagtgtttgtaggatatctatccaggaccttctggcttttaaagtttctattgagaagtcaggtgtgattctgacaggtctgcctttatatgttacttggcctttttcctttgctgctcttaatattttctctttattctgaaagtttggtgttttgattattatgtgttgaggggacttctttttgtggtccagtctgtttggtgttctgtaagcttcttgtactttcataggcatatccttctgtaggttggggaagttttcttctatgattttgttaaatatgttttctgtacctttgagctgtatttcttccccttcttctatacctattattcttaggttcaggctttttacgatttcctatatttcctggatattctgtgttagggatttgttggacttgagattttcctagatcgatgactgtatatcctctagagagtcttcaacaactgagattctgtcttccatctcttgaattctattggttatactcacatctttagttcctgatcgtttatccggcttttctatttccagcatcgcctcattctgtgttttctttattgtttctatttcagctttcatgccttgaactgtttcgagtgcttctttcacttgtttggttgttttttcttggctttctttagattctttaagagctttgtttactttttgaatttttggtttgtcttttcctccatctcatgtaatgttttgcttgtttttttcttctatttctttaagggatattcttgtttcccctttaaaggactctatcattttcttaagataattttttgaggcccatctcttcttcatcctctgtatagggcttttcagatcttgctggtgtggagtccctagattctggtggtgtcaatttggtttgtctgttgttgagtgtgttcttactctgtctttttcccatcccttcttccagtgagtgcaggtggggtctctctctctctctctggtggctggcagagggctcagcctctggtggcagcaggatggcagagggtggtgggtggacaagggtggggtttatctggactcaggatgggccttcccagtctgggcatgtccactcttgtctggggggtgggaggtgtttcaggcagaagtgagcaggggttgatgggggaggttggggaacagagcaacgccccagggcagatacttttataactgttttatttctaaaacatctgtattccccataaactgaattattcattttgaagaataggttactaatctgtgctctgttttaccatggggtgtagtattgaatcaactgcactaaaataaacacagtagtatttgctgtgaacaccacaggaagtagtaaaaaataccaatccaccattaacattatcataattgttattagcaaacatcatcaacatgttcttacctcttcaaacgttcctacttaattgtctattcccagcttccttgtgcatactcttcagtcctaattattaatattatgaaaactttcattaagtgtgtaggtctcattcttggtcctttatgaaggaatatctcccaaacttttcatttctgtcgtttggtagcaattccagcagtttgtacctgtcttccttctacatatcagttttccttgacctagttcagtggactacaagctgtttctaatgaccctaatatgaactatatattatatccagaagttctcaaatgtgcacaacctctgtatatgtgtccatagacacatttacaaatagagatacattcacagaagtactcttagacttctgtcatgaaggtcaggccttgggtttcccctctaagtctattatactttcttctattgtatcttatttcaatagaattaatgaatagatacatatctactacatgttttgactaaatgctcagaatggatagttggtctattttcaactgatgtcaatgccaaagtccattatcagaagattatatttacagactactgaaataaaattaaaatcttatttttttaaaaaaatctgaattttatttttaaacattattaatcatacttaaacacattttattttgcataagagacacatagtcaccactgtcagcttctacgttgttctaaaagtcattaaagcacatgttattgacatgaaggggatgcaaatgtttttactgatgaactgagataggtaaaacagcaaaatgtcttcagagaaattcctcatttttagcattctgtttatacactacttgttagttgtttattgaaataatccacagttgatactgtcctatatgatttaaaagtttaactaaagctgtgttcctctctctttctctcagcaccctctcccctacccacatgatcccaattaactcaggagatcttgtctccgagcttggagaaggaagcttacccatgaagctattggcaactggtagctactgggaaagttggttttctccaagtgtttagttcctagtaagttgactacttagtggaatatttcagatagcacaaattggcctcaatggttaaagtaaaagacatgaagttttatgggaagggaaagagggtggatttggaaagagtttgggagagtgaatatgaaaaagatggcagattcacaataagtcagacacatctcagctgtgcagttccttgtagaggagcaagggaattacatgctgcttgccaaagtaaattgtgttctactcactgggtgatattggggattttaccttcaagagcaggctactcaataagaaaacacacacacacacacacacacacacacacacacacacacacacacaaagatatatccaatcaatgtatgtgaaaatcaatccagaaatgccagaaatacaacttccaaattactgaacaaaaagatactgaagatgggtagcaatggcaaataaatatctcaaaagttttctgataaaaatggccagtctgaaagaaaacagaaacaaacaggtgaattcaatacagacacggaaaggaatgtcaaaaatatggtggaaaaagtcatcaagtgaaaaaaatcacagaaattgagatttttgaataaacaacagtaaaactggaaattgaaagcccaatgaatcaaattcaaatattgttggaagcagacactggacttcagtgaggagaggaaagaggacaatactgaagaatcactacattcaaatgtaaataaggaaaataaaaataaatgggtatggccagtgtccaaaaactcggggatacaatcaagagatgaaccctaagaaagtatgagacaaggaatctgagacaaacactaaaggcacagtggctccatttaatacaatgatgcatcaaatctacagaaagaaacatatttgagcaaaagaggctttcagaaccctaaatagatataaccagagacaacatttctccatgacaacttatataaaagatgtccaaagtacaaagcaaagaaatagaaaaaattgtaagaaaaacgccaactcatctacgaaaagcagaattatcagaataacaccaggtttcccatcagccattctcagtatcaggaaagtatggaatgttatttcaagccctgaaagtaaataaccatcaaacacaattgacttattaaggaaggctatcttgaaactgacagagaaataagagcattttgagacaagaatgaactacgacagttcatcaccaacaagccagaaccacaaaacgtactgaaaggaatattatatgtagaagaaaaggaaagtttcaatataagaagactacagaaaaaaagcagagaatagcttagtgaaggagagataggaaggaatccatcatgcccaccacatcagaccctcatatctctgatactaataatgaagaaagtaaagaacaaacaataatctcatcaaccagaaaataaccaacaaaactacagtaattaatagaaactaaaaattatataacttcaactcgtgaataaaaaaacacagaaagatgagtgcattaaaaaacaaactggatccaactggtataatcttctctgggaaagattatttctcctactcttagcatgcattagctgcctgtagccctttgcatagggttgaggtctcctaggctttccctgttcatgttaccatggcaattgttgctgtccttgtttaactcttgtttaggtagtataatatttctaaaaactataccccactgttaaagatacctaaagaatgagggtcaaaagatggaagactgaaaagaacagaaatttgattgtggacatgattccatagttaaagtgtttgctacatgatgatgaggacaagagatcaactcctgtccttgtttcatcttgttgctgtgataaaatatactgacaaatagcacaaagacaattttatctaggcaatatacatacaatttctaacatgaaagttgttattgtagaaaatactcagtaatcattttccatcttgtttgttacagtaagaactaagaggttcagaactggaatttaaaatcatggcactagtatgtgtgagatgtaaatgggaagatatcctgggggccaggcagagttagtaaccacaacatcccccaatgcaagcaaataaatgtgtgcctataattttgaagattatgatatgatttaggtccacaggaagcagcaaggctgctttcacctgggattccagatgttgaatcctaccctgcaataaatatcaggctgtggttggaatgtaaaatgaaatttaaaagaataagtaaattatttaaaaatcagaactcctagaccctttcaactgagataggtctgagatagggaaacttgaaacattctagccaataaaagtatcatacttttagcatcatacatcaaacagttcagaaagaaatagtctctgggacaagacttaggtagctgtttgtttccaggacacattctttcttcacacaaatagtcaaagtagcagtgtagaattttgcaccatgtcagaattacatctaagaaagcatcattaccatcttaggcacagagattaataataatttccagttaaagctagtaaaattagcacagaaaattctagcagaagtgtcaggtggaagggatgcctgctttctaaaatatacagaagcacccatgaaaccctgatagctcaatggtcactatttaagaagagccacccatttcctcaagacgatctgcctcttgcatgtccaacctaagctagagccctctcaaatatcttttattatggcctctactataaactccagccctcaaaactaaaaaattaatatctatacaaaaatgaaatatattcattaactaatgaaaagcaattcctataagttgatgatgttgagaatgctaccatttttatattatttggtgtaagagtagagatgatagtaaacagtgtggtcaagcttcataagcataatgtaagagttaatatatgtgggtttgaggaagtcaagagattaaattgagttaggaggaaaaattgctgctatgactattgtgtttggatgaagaagagctgagagggggtaagaggtagtgcaagaagtgaacactattctgtcatctagttttatgtgaatgggcaaaggacttctgcctatttggcaggagctacctaaatactccaaccctttaactttgtttcacaagaatatgacagtcattccaagataaaacgtctcctgcaatgacattcatggagcaggcctcataggatgttgtggaaaattatgggcaagatgtaggaagatctcacacatgaaaataaaccatcaccatcacaatcacaatcacaatcacaatgcctgggagttaaacactgcttcccagtgttctttccagagcaccttgacctccttgttctttgagctacacatcacagaattcatcaaagaaataaggacaatgtaggtcagagatgagtctgtctgactcctgggaactctaggacttaagcttgaggtagatgataaagatgaattggagatagataatgacaaccacaaagtgggaggcacaaatgacaaaggccttctttaccatcagctggagaaattgtaaggatggcaaaggtgaagaacacagaggagagggctatcattcctgtgaatagaccacaaacagacaaaaacatgtcatttttattgacagttgtgtctgcctaaccagcttgaacagaagtgtcacatcactgaagtagacagtagtaaagccatcacgggggcttgactaaaatgcagatgttacctttaatggccatgctcagactaactcccagtgacagatgtcagttaagactgaccctctgcactacaaaaatagaatattaaagagaggcctagacctggttcccaggtctctctctgacttgctgccttgccatgtgatcacttgttcctgcctacactcccccattaacacccttgagacacaatgcagtggtggtagggggggctgtcagtagaactgagctaattcagatatgtttgcttgaaaacttcatgatgtgagttgaattacttcctagtcacctcatatattttttctattataacgaaaagcttgctaacatagttcactatggttgtgcctcaaagaagaaatagaatttaaagagaagcagggggcatggtggtcaagagaatgaacttcgtagtcacatactcagggttaaatgctgtttcctccagatcctatctctgtaccatagacatgttacttagatttgctgtgtctcaatttctccatatttaatataggcttaattatagtcatcttcacagaaccaccaggattcaattactaaatgtatcaaagttcttagtaaattgcctggcacatagtaaatgctacacagtaagtcctaagtgtataaaatttgagacatccacctgcagggacagttaaggtaaagtgcttaaccccccaaatcgccaatgatcatttagaaagagaactaaaagataaaaatgagaggcaattgggacaataattgcataaatgttgcataaatataattttataacttacttaaagaggttggacagttaaccaccacattactatgtgacataggcaatcaaattcacaacagatctaaagtgaagagcaaccccaaatgagagttttactcactttcttttcagccatcaaatatttcttgttctcttattatgtgtcaagtctatggattcaatccctagtacactagtacacaaaagttgcccaatatttatcgggtgactatttaactagagaagtcttactgttaaatgcttcactgcagaactaacagggaagagtgtgtagaaatggtagtgtagagaaaggaatgttctgatagggttagtgcagaagaccatgaaagaataaaggaggagtagctagctcaagctgagcactggaaagcactctacaggagacatcatctaagacagtaaaagcgagggaatgatgtgtgcaccttggacacacaaaggtagagggaacagaacttacaagataccaaagtgaaagaatcattacagttcacaggttcaatgtggaaaatctgagcccagagagtgcatgattgatttttatttcacctcagacaaagtctgacctccctagaataaacttcaaacgtctataaaatggacattagtatttacttcagaaggatatttgagtctccaaataattgacatagtaacatatcaaaaatgttagccatgatcattagtgtctttgttaatgaggatcaggatctgtttggggaataaagcaaggttccaagtctagagcggcatgttccctagtagtcttaagagaccaagtccatgggatctgctttaaagcagagaagtccagttgtagaaagtgacttgctgtgtggaggctctcccaaaccaagcatgaaatttgactgaactgagtatgttatggtatactagccatctttgtgggttgtgaattgaaagagcctgtattcattttgttcaaactaggcataattatattgcaacaaatcacatcccttctcttctgccactacaagacatcatggcctttgcttatcaggctcttgcacacagcctttgccactgcatctgggcatttcctcagctgcctctaagtatcctccagccacggtgagaatctcattcacaatgcatgacacagtgcatgaaggtgacatgggaattccatgaagggttgtggttctctttttgcaagtctcttgtgaaacctatcaccttaaacatctcttgaccaacaaatacttagaaatagcttgttttggcttcagatttcaccttctttttctttaataagtcagagaacttagtgctttaagtaagtctgcgccctcttttctggtgcattgttttgcatccgaatgcatctggaaagttacctgcttcttccttcgggttgcaaagactcctatcacttatttccattaactgtatttttcaagcttcgaagaacctatacatttctatgaagataaacaaccatttatctttacatttagcatctatctataatttatccaagaacaaaagttcttcttgtttaatggctcaaatgttggagacagctttgcaattttttgaaagcacaaatacactatattttcttttatacagcaagaggttagatggcctctcactaaatacatatctttaaacacactataatcctttctcccaaatgtgatgctgaatgctttctttatattgtattacagagttcagtatttgcccccaccatatgccacaaacaatgaaccctcttccccatttggttttgttacacatattagagtttagtctgataattctgcttgggtttcctccatttctgcacatctttcaaacaaagcatcaaatgcctttgttctaaaagattatttcaaaaatgtttgtaccataaacagccttggaagatagagacgtatccctctctggagtacatggccagcaggcttacagcacaatatagctgacttcagctccaaaagccctaacttccacttttctaatacaattcaccacaacgcagatatactgcctacatttaaataaaatagtggagctttatattttccacagagattcacaagcaggagaaatgctaagtagaaaataagagggttaagaaaaattccttttcttcttactagtagatagttatagatgggggaggagagtggaatgggatcaaacggggagggaagggaagagggaggggctaaagaagagaatatggggagggttagctaaaaactacggctcatttgaggatcgtctgggaacctaatatagtagaagcttttttaaaatacatattatgtgaaagaaatcttaatcatgtatgaatccaccaaataacaggaaaggcacagctctaactagacatttctagccacaaatgaaacctccaggggtgggaatggttacatctaatcaagttgttgaccaaaggagtcccatggaaagcctaaacaacctaggctgcttccaaggctattgggtgtcctctgtaaactgtcttcagtcctgctgctgaaggcaacacctatgtaactcactagacacagagaagtagagctgttcctacttagagtcttcatacctactgaccactgtccataatactagaaggtactctgcatgctacctgactagaaaggtaaacaccaacccagttacctaccctttgatctacaatgatgacctacctgtaagatgtgctggtacaatagtggcagaagactacataggccattgacctaggtgaaaatcaaatcccactgttctgctcaaggaatttagctttaaaatgactcataatgacattctgatatactcaaatcagagtattgctcatctatcaagagaaatgcttcctcttgcagtagatggaaacatataaagagaataacagttggacaatgtgcagagagggagagagagggaacactgagtgctaaatgtgacatctgatgtgggatgcccttctgtatgctgtgaatatgttttattactattggttaataaagaagctgatttggccaatagccaggcagaatagagccaggtaggaaatccaagcaaagacacagggacaaaagaaagtcagagtcttgaagataccaggagctgaccgaaaagcaggatatgaagtaacaagccaagagccccaaagtaaaatatagaataataaaaatgggttaatttaagttgtaagttctagttaataataagcctgagctaataggcaagtttataattaatattaagcctctgagtgattattttgtaagcagtgggacaaaaagcttcaggctacagatgtctccatcaaatccctttcctcgggtctcagagaactctatggaagaaaaggaaggaaagactataagagccagtagggatggaagacatcaaacaaacaaggcctaaatacaacaagactgattcatgtatgaacttacagagatggtagcagtatacacaaggcctgcacaggtctaagccagatgagggtcccagggctgagaggggaaatggaccaatccctaatccagaagctgtcttcaattaatgataaccacttgcaaaggaaaagttagttgtttctaatgatatctccctagtgatacaatccattcttaagggcaaacctcatgcccaacagtagagagccaactcaaaacaaattagatggtggtttcagaggcttttgtctcataatgtgttgtctgggaatgttccttaccttacaggtcttttgcttgttttctgtatgtgcaaatttggaaacaaagtagttgatgtgaagactgacagaagagatgtgtccaacaactgtaagtcccagaacaaccaagacttgaggattgacttttgggtccaacaactgcatgtcccagaacaaccaagacttgaggactgacagaagagatgttgtgtccaacaactacatgtcccagaacaagcaactagaggaaacagaagaaacccatgaatttccagattaggtaattaacatacttggagaaaataagaaaagaagacacattcaaaggcattaccatgtgacactaaaaaacaactctagagatgaggatgaaaatgagaaatctgtcatagttaaaagactgagatttcaaatgaaatcgggctttttaagtaatcagacgagaaggtagaaaaacagagtccttcataatcatgagaagaaatcatgtctaagctaatccattcgcagtgaattaatacgccatgctgattttctcagaaatttattcaagggctgccatataaaaaataagagacccaggaaatagagaaactaatagagagaaaatggaattccagaatattaatgaagaacatctctaggattatggtgttgcagcagtaacaaacaagaccccaattcagatagagaaagggcatggaaggactccagaatggtcaccttaagacaaaaggaaattaaataaataggaatccaaaaaaataaattacataagacaattacctgacatatttaactatatttctatatgaaagaattcacagctccaatacaaagtttgaatgctaattaattacagataattgtaaattaaacaagtaaactaaaggttccatgaggaaaaattgcatgagatatgcccttatagtaagctgcatggcttagtttgaatagtatttgcatatcataataatgcatgatctgaaaatagacttaatttctactgagaggatggcaggaggggaagtatgtgggtgtgtttaggttcatgtgacagcagatgagattacaaatgagctgggaaatcaggagacaaagcctaacatttagaaatcaagagacatcaatatgtgcatcttatctgtgcttcggcgctattgtggaggcacagaaattaaaaggcaggtaaaagagtcaaaagtagttgtttctaggaaacaagaattaaaagtggaggcaagactaatttttaaataatgttgcaccatttcacattttcaatttctttatttggattatttatcaaaataaaattaaattgtaacaactaagtattactggaggaaaaatagaaacagtgggtgcatgattttctagacagaaagtggacactaataagaaattaatcaatcagaaaaggctttttttaggaaattgaaattagaaaacctcagtaaatggaaatagaaaatgtgatggcagggtatttcaacaatttatctaattctaataagtattagtggattaagctagcccactgaagtaaggaagctcacagagtggattttgataatctgacagtccattattttaaatatgttaaaataatatgccacagaaagtttcaaaataaaaaaattaaatagtattcaggaaaatgcagaaaaatgagagataatgccatatcatctgtagcaagcaagatattattcaaagaagaaatcactaagggacttataaaattgataaacaaagtaattcattggaacagattccattcatgactttaaaatgtcctaatggcgtaactttaaaatatattattcaagaaaatgagaaaactaccagggaaactggcaactggccaatcagcagaagacagcaacacatttctttctttcagaaactgaatgaccaacttgtcaaagggttcacaggacgttaaagggttgccttatttaaaatttttgaagaccccaaagttgccccatatattcccacaccacaatgcaataaaattggaaattagacagagaaaaagcacagacaagcccacccctataatacgtccacttggataaatttcatctaataaacacttctgtcacacttctgggtggtataggtcactctcagaaatctcaaatacacactctctcggtcattattgtaattgcttgaagtatgaactcttttccctcacagtttatatacaaggaaattaatacacaggaaaattgaataatttctccaaagttatatggatagtggcagaacagaacacaaacccagggatcctaaatccaagctctgagcttttgattcctctttcattccatttatttaggaataaagaatatgagtggaagtcagaggacaatctgtgagaaccagttgtctacttccaccttacaggtccaagagataagagtcaggtcttggtggctaacacttttacctgcggagtcatgtctctgaccctgagctcttgatttcttggtaggctttttctctcaccatagatgttaaagtaccctatatcaaaacacatcaaatgtttgcaaaatatatgcatttattgaagaataaaaagaaatttgtaaaacaataagaaatgaagagaaagtagaagccaaatgatgaaatgaaaattagctttaaaataaaataaatctagaataacaaaggtgtttttttttttggtttgggttttttgtttttgaagtttggatatttgaaaaaaatgagttttaatatgaaaacttaaacaattttgactaagaaaactcagaatggcaaaataaaaaaggtaggagaaatgggtacagagattgacatagataaacaatgtatttctaaaattatatcttgagtgacttaatatttatgaaattggaaaagtatatggaattacatattcaaaatgtatatactatataaacaatatttttatttatggagtatatacacataattgcatgttaggaaatatatttatatactttttagtatgtctataaccatagactaataaattcacatatttaagtacatatctatgtatagaaccataactagacaaacaatacatagaaaatgtactgtaattatccttccaatgggaatggtaatagtgaaaaaaagatatcaagttcaaaatgcagaaggttgtgaaatttccccaatacttaaaaaaagctgctaattacaaaccttggataccaaaaatagataaaacagggagatgtaattatcagccaataatgaatagaaaaaagtagcaaccatgtataaaagaacaactagggtctgtcttaaaaacatgaatgtacccacgttagaaaaaaataatttaattcatccgtaaccagttaaagaaaaagacatgtagttatatcaatggatgatgaaaaggaatgagctgaatttttttttaattcatttatgataaacttgtaaacaagccaggtaatatgaggcaatcccctttccctttcacaggacatctgtctgggatctgtaacaagcatcatagttaacagtgactaaatcataaaacacattgaaataaaaatctaggaaaagatcaaaatgtctctatgactcctagaagttagttttatattaaaccaaagtatcaaaataagcacaggatataaaagtcaggatgggaaaccaaactgccaagatatgaaggaagacaatttaattatgaatgtatcttcttccttttcagaaagtttcttttattccaggttttttcatcttatttcaaatgaatgtatagttggaatcacaattttaaatattcagtcattttccagttcattattttaatatcaaggtttccttctctttctcctgggtttacattcaattctctctcaaatatcaaaaacatacacattgagatagattgaccaggattactttgaaaatgggcattaaaaagtaagaccccaaatttgttgattgcttcaaggtctagctaagatccactgtccactttctcacttgtgtatggttcctccctgcaggatttcaaatggtcttgctgaggctacttgtaggctgttctcagtcagtgataaatacactgtgtattcttgtgctacatcataatgtctatgagcctgaatacttccaatttcttttgagtaaatgtttgaagaccttgaaagagattgtgtggaatgaactgaatgcctgactacagctccatgcctgctattctctcagtttaattggcttgtcaaagataccacaataaactatctcgtattcaaacattcatttctaggtataatggaatatagaaaataaagcctttttgaacatccaatagaaactagcaattctagagaagccaaatttatgaataactctgattaaatcctccttctgatcttccttaacaagaaggacctcagtcagtcccaggtgggacacagtgatgcccatgcattgcaaagctaacagaacaggcatttgcacaggtgcaatatcccaagtggatgccatgtttcacgtccccagcatatgagagatgatcaacaagtagttttcgaagggatcagtatatgattgtgttatacttagattgaaggactctcaaagacagatgttcagttattaggactgacagaccccaggatgtaaatgacttgtcaaacagaactccatccttaaaagtctttgggaactgagattctgtttataaaagtaattcagagacaagtgattctcttcatccccttagcatggcaagattatgtcctcattcaaaatccctgtgggaaagtcctcattgtgcatgtatgtgattgggttgagaacctttttgtgatgggatccccagtcaccatggtgttggatcttgctattgttgccttgaggatggtcattatgaatttgtacagaaggactccagaatcttagtgcgtaggggaatggttctttttgatagtttacaacccacaatttaagaaacagttactgtagccaggcatgctggcacatgtcttaattcacagcacttgggaagcagaggcaggcagatatctgtgagttcaaggctagcatagtttacaaagggagttccagaacagccagagctgctacacagaaaaaccctatctttaaatgcaaaacgaaacaaaacaaaaaggggaagggagaaaaaagaaatggtgctttatgcagctcaagagaacttactgctcgtgaaaatgatccaggacaaggcaacccacaaccatccataagtccagttccatgggacccaatggtctcttctggccttctacaggtactggacatgaatacagagcacacagcatacctgtaggcaaaacactcatacacataaaataaaaaaaatcttcgaggatgacaaagtggtgttgtgggaaggctcatgagtaccttgtgatgcttcctgtgtatttgttatttctacatctgactaaccgggagtagttcttccatgttacatattctttatgcagtgtgcctgctgcagcataatagagggactagatacaatgcttcaagcctttctcttctgaatcaagaaggagcccagtaaggtaaagtcttgttctataacatgaggaagcaagggtttatcttctgtagctaaatgtggtcttatggctctcatctcatggaatagtagtgcttcctgggaatattgacaagtagaaaagaaaatgagtgttcagttgtgccacaaaacttagaaatccaaaagcataaataatggagggaaattgcccagaaaagccacttgtcatagagaagatcagacaaatatctcaaagggtttaattggtcaatctcactgaaactattatctccatgatgtcaagttgagctagaccagagaaatagggacagccaattctgttccctctgtattctatcatactgttactacttggtacctgtaagtaagtagtggaaatctggttttggtcaaatgaattcaattttccctccttatcttggaaagggtgtttccaagaatctcttcctttcttaccacagattttaactatgggccagaagggcacgagtttatgattagctagttcatgtatcaatgctacatgagttcaggtcatcagtggaggtcgcacagtgagagatgctgcatacctatacacagggattccagaggaattctgtagggagacactgtaaccacgcctcctaagaagaggctacaggtgtgctggaccacgcctatcaggtgatgtcaggtgagagcatttaaaggaacagacaaggcacatggctccctctctcttgcctctctggcttgctgcttttggcatgctctggcttgctgttggctggtgtttatctattaaaagatatcctaaccttatggatttcatatcagttatttttctccatagaattccatcagggctttcggagcactgggactgcttactcacatcaatcaacatccagatatttctccagtccttgagatcatcatctttcctgcttgaatattgtatttctcttgatgcgatctccctgccatgtctccaggtgaacagcacaatttgaaaaggaagctgccacgcaagtgcagttttcacacttgaaacccagcttgggagagaggaagagttagaaaacaatctgaactgctcagttttgtgcgaaatattaaacagtgacataaaatgtttgtattttgagatatgtgtgaccacattgatatctgggtaccacttactgacatgtatcctaccagattctaacaaatgtcttatcagcatagtctcatggcctcttgacatccatcttatgtggatgagggatgcagtgtcttcaatgtattcataatagcctgaaactgaaaacaacctagatgtctctcaaccaaagaatggataaaaaaagatgtagtacatttacataatggagtattactgttaagaaaagtgacatcatgttaagaaaatgacatcatgaaatttgtggacaaatggatgcaactagaaaaaatataccgtgagtgaggtgacccagacccagaaagacagatagggtatgtattcacttataagtagatattaactgttgagtaaatgataatcaagctacagtccacagacccacagtggttaggtaaagaaagaagagagccctaggtggggacatggatttccctgggaaggtgaaataaaatagatttttttcaggtggactggaggtggatgaggctgagaatggaaggaatcatgtgggcagaatagaggaagagagtgtggggagacaccagtggaattggggaaacctaatgcagtggaaacttcctagaatctatgaggatggcccatctttggtagccaggcaaggtttacagtggtgggactgggttgtatttggttgagttgttagatgaggaggtcccacagtagagatccctaaacaaccaggctgatgctaggacagaaaatcattctctgaaaactgacagtagggctgcattgccaaggatgacatctacacatctcattgaacacacagaagtaaagccagtgctgcatgcagctttcacccctacattctattcgctttggcaggagaaggtactctggggaagaggggcagtggaagaggactgggaggagtggagggagggaaaactgtgtttaggatgtattgtacaagagaagaatgtattttatattcaaaaactaaaataaaataaaaacaagtgaagaaattgaggcctgaagagataaggaagtttccatggtcacatgggaaataaaggacttggggttgatttgattccagatcaccccattcctatcaccacacactttagaatctagaatgaatgtgaaatgtgaaactttccaattgatagatcagagaaattggcaacaatgattcatgacatcgtaaaagaaaggaagtatggggagtggagatctggacacacagaagtagatcccagagttatagggagtatgaatgggaaggatgagtggggaggaagcaaaaatttaatgtattgatttcctgttatgtactaagatgtgagcttggcaattcacatacagtaattcatataatctccatagcaacactaggagtagcgttcattcctctattttataggtaagcaaatgaagacaaatgaaacgagcaaagaaaatcggatgcctctccatttacactgcggttaaagccaaggatttctataaacttaaatattttgttgcttttatcactgttgcattatagttactaatatttcaaagtgtcacagcctttactgtgcttaattagggatgaggaaagtagaagctgaaatacagtccccacaggcaggagactgagaaattaaaacaagtgattactggaagccaagaaaggaagttaaagtgactaagaagctggctctgaactatggaatgttctgggttcacactgtattcaccccaacatgaaaatgtaacatcttgcttcactgacatattccagaccttagatattttgatttgaccagtaagaggaagtgttttgttcctagatttaccaaatggaaattcctttgggaacgagatggaactggcttcctgactcccagaagtgtacctcatatacttctgtccctggcctgaaccaattcgttctaggcatgcttcttcatggtgtgaccctgttatctgaccagtcgttgacaattcaaaccataaatttgggtggagatctatggccatataccctcagtgcctttactgatctacagatattcttagccaagctacgtgtggctttcagtactcattttccatctttctctttccccatgtctccatcatgcttctctcccattccaataccctgtgaacctcaagagatgttagagcacttggccaggttctgccaaccaatgctgtatcactcctgaggccctgctaataatcacggaccagcctgttgttatcaatatgccaactttagagctatgacagaatttacctttgaaggttttagtagaaccacagatttatttttttatggtctttcaggtcttatacccaccagctcctccaaaaaatgctattgtctgacagttatcagttttcaatctcaaccaccgtcaactttacacacatatatgcttcttcctggttgtactttccactttggagaactgttactccatgtccatcatcccccaaatgctcttccgtctttgtgaccaagaagaagcaatttcgattccaggctgtgccactcagctcttctgtctctcttttggtgttaatggctgctttctgctcacagccttggagtatgactaccaggtagctatcttaaacccacattcatagtcactcatcatgggcaaaagacatgaatgtagttggtgatggatcatggagtcagaacctggccttagcatgaaaatcaatgcactaaattggaagtctccattgtttatgtctgacacttaaaaagctgttctattactgaagacaccacatacattggacacaagacttggataagacctgatttgaaggcctcctccatgaaaactggcttttatagtaccagaaaatgctgtgcaagttgccaaaagaaggatacctatgaactataacaataatcagcatgacaaggtattccaaaaggtgtaatagtgacactcacattgtggtagtaatctcctgctctctaacagacttaagacccactcaacatgagggaaatcatgtctgatactggaagcctaaacaactacccgaggctggtgagatcatggatcttagaacagactctatagctaccactttactagatcagcaattcctaactacatacttaatattttcttaatatttatccttatacccacagataaatataactctcatctctcatcaaaggagcttccctctctttgcctcaagatagaatcaactatgggatataattctagggtataatcctctattggactgggtccagttaaatttcagctgagattgcattcttgctgaaccctttctgttactcctttctctgattctattatctgaaagaatcacctgcatttgggtccttgttttgggatctacttatagagaaactgatataagaaaggaggtgtggtaattttaatgtaattgggccccacaagctcataaggaatggcattattagaggtgtggctttgttggaggaagtgggactctggggggtgggctttgagttctcctattctcaagctactcccagtgccagagaccatttcctgttgcctccaagaaataagactctcagttacttctccagcaccatgtctgcctacataccaccatattcctccataatgataatggactgaacctctgaactgtaagacagccaccccaattaaatgttttcctattctagactcaatcaaatcacaaaggaagtctgaggaaggtagttgtagacttgccataggttgaaaggaaactatgctaatacatactgaaacacagagcaatggaagacttctgccaaactgcctaacctattcacctatcctctttcccacaattcctgtacaccatgacttctttctaagagccaatgattcttagtaagagctacctgaataaggtgacattgtatgtagagagtacagactctgggtccagagtaatacattcctcaaaggttagttcaccactatacacatgaatcataggaaagtcacttaagctccctgatctttattttctgtccttattgtggagctgataacatgtcaaccttccacctctcaaagttactgactaggctaattaactcaatggaataacatttcctggcacataggaagcagtagtattagtacctcctcacaatgatgacctgaccacattgttctgagtcactttgaggtcaacattaatcaccctgtgtggtcttaatgaagatccttatttttaacaatcaagtgattgagttctctctcccaaaaggtcttgacattacaaataagagtctcctataatccctgatctgtattccagtaaaaggtaactattttcctaggatcatccaagaattactgagtacaactgacccatgttaagaaatcactcaaccacctttctgatttctcttccagattaccgtttcttctaccatgctaatttactggcttatcaaatatatctcacagctcccatttctcttgcccttcagagtcagtatgaggaatctcagaatttttgtattcatcaattctcacatacagcctgaagaaacacatacaaaatcatgtacagctatttttaatgtaatgtttatttgaatgtaaaccatttattaagttcacaggtgttttttcagatttaagttttatacaattagataaaatagtgcaattatgattatccaactggaatcaagtcaaaggttcatgaaatagtttgaaactgggccaaagattcataaagtatttttaaaattgggccagcaagatagatctgtaagtaaaggcagttgctaccaagcctgactaccctgagttcaatccctaggactgacatggtagaaggaaagaaagaacaagttttcctctgccaagttttcctctgacctcaacattcaaactatggtgcatcccccccctctctctctctctctctgtgtgtgtgtgtgtgtgtgtgtgtgtgtgtgtgtgtgtgtgtgtgtgtgtttgtgtgtgtgtgtcactctctctcatacacacacaatacatatatgcaatttttaggaatttaaaaacattttgaaataggtaacatccttgttggccaaggagccccatagaaacctctgaacaacccaggctattttgaagctattggttgctctccccaaactagtgttaagtccccattgataaagacaacacctacataattcactgaacatattgaggtcaaactggtgcctacctagagccttcatcctctacccaatagtgtccatgttactagaaagtactctgcagtttacaggaggagaaaggtaaacaccaactcatctacaaatccttccatatacaatgtggtcaggtcatcattgtgaggaggtgctaatactactacttcctatgtgccaggaaatgttattccattgagttaattagcctagtcagtaactttgagaggtggaaggttgacatgttatcatgtcatggtaacctggctgcacaatactctgatacaatagtggcagaaaagttgtgggactaactaaccactgtcttgttggaattaaggtcaactccatgagatagaaccaatacccagcacggcttgagcagcaaagaatctgagactagataggtcatgaaccttgggggaaaacaaatgctattgttctactaaaggaatgtaacttttaaatgactcctaatgacattctgctatactcatagatcctaaatgtgacatgtccatcaaatctctctcctcagagctcatggaaaattgaagaaaaagaggcagaaagattgtaagagtcagtggtgatggaagacaccaaggaaacaaggccttttatacacaagactgacacatatatgaacccacagaggctgtggcaacatgcacagggccagcacagttagttctaaggtagatgaggtcccagggctgaaagaggaagtaggcacaagcccccatccctaactcagaagataactcctatagacaaccccttacaaaggaaagactcatttttttccaacagatcctcactggggatacaaacaatacttgagggctgcctctatgcccagcaatcaatgaccaacagaaagtcaatgatatttttggagggtttttgtctcacaatgttttgtctgtgtatttttccttacagaatttttgcttgtttattggataaaagttttggatattgtttctatgggtttcctgtgtgtgcaaatgtgtctatgcatctatatgtatttttgtgatttttctttgactcctttttaaaaatctgtttacttgtttggtcctactctcatttgtttattttttccatcttattttatttttaatgcctgtttgttttctttttaaatgaatttatttattcttattttatgtacattggtacttttcatgtatgcctgtgtgagggtgtcagatcccctggaactgtcattatagaccgttgtgaactgccttgtgggtactaggaattgaattcaaggcctgttgaagagtagccagtgctattaactgatgagccatctcttcaaccccttcctgtttgttttctaaagagacagagaaagaaagggttttgatttgggtgggtagggaagtagggaatgtctgggaggagttagaagaagatacattgtttccagatattgtatgaaagaaatattttctatttaaaaacatttttaaaacaaaagaaaacttgggagctagacccagtagataacactctcaccgcctgaaggccagatgctataatcaaagtcctgggaggcacagacagctggacccctggagctcattgactttggcagtccagcataatcagagggttcataatcagtgacagaccctgccccaagtaacaagaatcattgaaaaagacactaatgtgccagcctcttgcttccacagttacatgcatacatgtgcacaggtacccacaggtacacagatgtacatacttatctgaacatgggtaggtgcttggatatcacctctcaaagtgactggaatatggtaggaaaagatgcaggagtagacatcctgcaagaacctcaagggaatctgttttgtgttctacttcaggccctggactgacccagtgacctgtgaaaagcataatgatgaggtctagacttgaaatcctcaactaaattggatgtcatgactgacctccaagaacgattagaacctagttccaaaataaaacaatatacggaactggagttgttcacagcagcttcattccccttctttgcaaactgtttgcagagccatcctgtatatactcattcctttctcacccaaatcccaacatgtttactcttggtagcacctgggcttttcatacagcttttaactgtaacttgaattaacaccactgacttcaccagatcctttggaggattaactgagacagaaatctgtaaacatatctgtcaaatattagttgagactgaaactaaacatctctcctttccatcaggcaccacatttttatagcatcagccttgttcctcattttcaaaatcttactaattatcccaggacaacctgcaacttgatccccttgcctgttgagatcccagagctactgatcatatctaatgataggcaattaatatgtaaatcatttctatctgaaagaatgaactcgaaaaagtttattaaatgattgcctttcctcttccgctgcctactgcacattgattcaggcacaagccctattgatttccctcactcacatgaatcccttcactgtgactatccccaacctgtagataaatcccaattatctctgttagatcggaagccaagctggtttctctgcctcttctctcctgcctcaaatccatcaaatcacaatgatgccaggtcagtctttgccagggatgtctttttccagcaaggaagcaagatagacaagggagagggtaaggtggctagcagtttaaaaaataaagtcatttccttaagagacaagttgctaagtctgtgacctgggaggataagttaagaccacttaagaggtccttctcagtgataaaaatctaaatgctgtcaaactttcctcacccagcttcagtttaccgacctccatctaatcaagccatgtctcattcttgtctcactcaagatgatgttcactttggtttattgtcatctctcactgcaaactaaattataaactctgaaaattataaagtctgaataccgtctccttcatgagtgtagttccagagacttgccaaggcctggcatacgataagtgcctgaagaatgaatgaaaacacatcaactctgtgtgttacaataataaagtgttaagaaacctatagaaaatcttcagcaggtatcaaatttgcaactgagtagtagacacttcccagatagagaagggaagaaaaagctgtatagaaaggagagtgctgctctggccctggacacctggggaagggcccaggaccagcacaggaagatttggtggactttgcagagcccccattgagggctctaccctgcctggggagtggtgggtggatggagtctggggtgggctggggtggggaggagggatgggggtgaggggagggagagggagaagggacttacatgtgaaaaaagtttgttccctaactggaactaataaataaatttaaaaaaaaaagaaaggagagtgctgctcttggcctggacacatgggggagggcctaggcccggcccaggatgtgatggactttgaggagccccatcgatggccctaccctgcctggggagtggaggagtgatagggtggggggcaggtggagggttggggggagggttggggggaggagggagaaggaattgacatgtgaagcaggcttgttcctaatttgaactaaaaaaattaattacaaaaaataataaaattaaaaaaaaaagaaagaaaggggagtgctgaaaagcttgccactgtctcctagccaccaagagtctaaagattgttcatttctaaccctcagtgccatggacaaacatagggagaacggaatgtctgtacaaccagggatatctttacatgcatgagtgcatacctacatgcatacatacatgcatgtatgtgcgtgcgtgtgtgtgcacgtacacgagcgctattgggaattgaatacagagcaacctaggcagctcatatctgaccacttttattccaaaataaattccagatttttattctgcatagaatctatgtgtgaaagtaacagagcctaagctttctaagatctatgataatatggctccaagcttgagctgtctaaaccagttttctacactgctttctgcttgaagcaaaactttcccaagacttcttaacactaatctgagggttgggcaaataagacctacacacagtgaggtcttcaggtacctgctgctgtctccactcagctctaaaggcattctcaggctgtctttggggagatggcccagaagctcctcaggctaatcactgtaggacatattctctggctttcagggccctaatatgtagaggctgacaggtgtacccaggttataaacccaaatacagtcctacaagaatgtgtctcctctgcctcctgggtctcagccctgacacatccctcttaggcgcttgttctttcctgcacctgtactgggactcacagagcccaccattccaatctctcccccttggcttcttccaggaacatcctgctattcctggtaagagctctttaggtaaagggggaataaaaattgttaccctgagatgagattcttcataaagataggctccttctcctaatcttctttgaagagttacacaatttcaggggtagggagtcaccaaattctcataactattcttccttaagacaaacagacttcagccagatcaaatacaacaccattagtctctggtaagaatttcttgacactctgaagaagtccccttgtctggtactgcctggtttttgttcagaggctcacagagataaataccatatattttagtatcagattattttctctattgggaaagattctctactgcagcttcagtctcttttagcattcttagtacaaatgattaacagctggtcatcaacttctgttaaatggatttttataaacttgaagaaagtctgcatgctttcatcactggtatgatttactttatgtaaaaagtcactttctgaatatgcataagcaaatcagaatataatttaaataccctacaggagcttactgtttaaagagacaaaaactgtgaaatattacataaattggacttatcctcaaccttcagcaaaatgatgtatcctcatggcaactctgctttttatattcagagtctgcctttccttgggtgagggatacttgagttgctgcatctttcctggtgcaattgtttacctctgcagagtaagtagatggctgtcctcaacatccgattggctgtaaatttgtcttctagtttagggaaggtaaaaatgtagaatggtttacaacatatgtgaatcagtcctgggaactgtcagcagacttccatcattctgacagcagaggggaggggttggtggtttgttaagctttgccttttacttttaggaaaacaagacagacccaactctagctttactgtataaatgacataaaagaatggtgattcatggtcctgaaagtcaaggcctctccagtccatccctaaacaaatggtttccaagcatctaatgtatatagcttggaactagtaatatctgagatgtatctgagtttttgtgtaaggagaagcaaagaaaatggagatataaaataatgcaaataacccagagaacatgaggatagtataactgttgtagagaactgatcatttgtactggtctctgtgtatgaagaagagtagcagggcagaagaaacatttagcagctgtatagtcagatgaagcagactagatgagtttggggcacacaggctgctacaactacaggccctaaagttaagtaaaccaacagggtattaactacaacatgtgtcccaagattcatagctagtaactaaattcaacagttttggactaaactgaaacaatattactattatttgtgtacatttctgatttgataaccactcaatgaagaggcagaacaaccttcatcactagagttactttccaagggcttaccagtggtctgagcaccagatcacccttttgcttttgttcattaaactctgcatcataaatctagcaggcagtgtcatcatcatagccatcatttgagtaggtggccatttttacatacccctgaatttcttcctaaattccatgtgttctttacacaactgcaggcattaaagcaagaacatgacacatggaatgaaaaatgatccactgtgttgactccactacatgaggtctaagcaaaagaagaccagaagggtaagtagggtcagattgagcaggattaatgtaccataataaggttgaccatcttcaacctttggacagtgggaattgcctacaatctggattatgaagcttttctgtagattcatgacactgtctgaaatacataggaaactatgttacagaaatagagaatctgaaattatcattagaaataggagagagaaggtaacttgggtctggagggaatattcagaagcttatacacttaaatcaaagcctaatctaccaattggtggggtggtagggggacagggagtattgttgagatttgctatgaaatgcagatgagtgctcagaggagaagagcttgatgtcatattagagggatggagatacctcagaccttggaactttctaggacatactgatcacttgagtgaagggtggcgtcaataaaccagaaaagttttcaaaggaaaacacaaagacctgaagggcacatgtctctgcacccagatgacagcacaacccagtcctcttcaagattaacagaaacaatgacaaagaaatcaagctatgtctaatgttatctgagaacacaaaaggttgctgaaataaccgagagggttttgtttgttaactaggaaataaaagtacaaaagcattacaggcaaagattttgacagccacacattaaaccttcatggaatttttacctcataccatacactatgttagatatgaaaatgctgaaatggaccctgcattgtaccctgataatggttgttccctgagaggcagaactcaccatgcagcaacgtgacagagaaatcgacagagaatgcttaacatttaatgacaaatttgcaagccttgggatattttttcctgatctatataaagcaaaatctcatcaaggagaatggaccttcatgctagagttcagtgaaataaatgcctgtttcctggacaataaggcattcttgctctgtgtgaggggctgtctcccagggctgagggctatgcagctcctgagtcactcagaacatttgtcaccatggactcttaaggcatttatcactcaggtgttacagaaaccttgtttgaacagaatagcttagcagttggatattacagaatcaaatgtctttaacaccccttcttgcccaagcaaggatcttatctatttttttctcactttcaaacaattccagtctctcacataatgtctggctcaaacaatgaatgagtaactctttccttccatgggattattttgatcgctaatcgtgtttaggttcactttgtgaaagtaaacatctttccacaatgtggtcccttgcccaagatacattcccaaccatcatctcactgatttctcaaaacaatgtagagggaaaacagaaacaagggtttccattataggcaaatcaagacaggaagagtgaagatagaacctgagcttataccagctgtacctgtcattttttctgtttgcttggagtacatcaacacccgaaggtgactcacagtgccaatagtaaaacattggagaatcaatctaagaaatattaaaatttccaaggtctcgaactttctagataaaacaaactctcatctggagtaattttcaaggtatggataatactagagaggaaccctggggctctggctttagcccatggaaccacaaaaagactatctccactgggcaagctgtaaatacccatttgcacagaacctgctgaagttttaggagcatgagtgtattcaccttctctcatatgaaagctactcatacagaaatttttaaagctctataagcaaacctggatcttgcattgatttaagaattcaacagacaatggactcgtgttaggtctagtactgggtactgagaacatagtgataaactatgttcattgcctgttctggggacagggagagaagtagatttttattttgctaattttagcagactagtgagtgctgaactaaagttttgtgccagtaatagggatatagaaggtagattttgtttcatttcatgatttttaagttatgaataatggaaaacaaatccatgttctcagtcagacatcccatctcttcccccattcatataatcaatacttattagcagcacagagaccatgaaatggatatttgtgtctttatggcagtctgttattcctctgtagaaaataatctgcaactccatttgtgagattctatttctgcaagatccatgtgaacctttagatagcatgagtttctctgtcactctctgcctggccagctgagtccaggaaatatgaagtaactttatattctccctgatgaactccatctccctgctctacagaccagagacatacatctctgagacacgtgtaagcctaagggaagcccattcttttgctgtaaggcattaataataatccaaaaacccctgaattaggatgatggttaatgagtatcttcaagacttaaaagtaggcagtcaagaaaaaccaagaaatggcatctaataagtgagaaggccatggcttgagtctcacctactgaccccaaatctccattcttcatgtggtgactgcaatgcatcaatgataaattgggctcctaatcaaagcctactgtgcgttcccaggaatcacatgaagagcagatttggcaacataaagacaggcttaggaaggatggaaaatagagaaagaacagttctttctttctttctttctttctttctttctttctttctttctttctttggtttttcgagatagtgtttctctgtgtagctttgcagcttatcctggcactcactctggagaccaggctggcctcaaactcacagagatccacctgcctctgcctcccgagtgctgggattaaaggcatgcaccaccaacgcccagcgatcatttctttctttagtgattagactgcattccttacccaactagaaggcagaaaatagtttctagagatctcagtaaagattttcacagatcctcctggtaagtccatgatagactagcctctcagaaaagtcagagctttcttcctccagacattcaccatctccaatttcccatttttcttttaagttccaggaccctggcatcaacatctcctctttctgggcctgtaaattatcttcctgtagctctgacagtgcctgggtacttaatggagcacacaagcagcttcgaaacagttacagtacatttttatttgatccttaccgcaggcctacaatgttggcagacacatcatctgcactacatctgtgaggctaggaagcagttggtggcctcctataagaaatccaagtcaaatgttgatgactgtcagagatcctatttaaatacagttacttgtcccaaatccactctcatgcacagcctttcttcaggaaacccatatcacttactgcatgcaaatcagtttgatctccagactatctccttcctgacaatatcaggcttgtgggtatgttttgtgctttccctggagatgacagagaggcatgcctgacccaggtcctattgctccatgattgccaataagaaaagatttctctagatgggtgctcatttgtgttataccactccaaatatatttccatctcccacctctctttccatctcccactaagttacctgtaaatattttttttcttcttctatggacccttctattctggaggctatatggttgtctttgatcttcagaggaattcaccacaaaggaaacatttgtggaaatgctggccaggcacatttgtatggtcaatggcttgtgtttagaaatctttctgaacagcctgtaaagggatacttgtcactgtcactgcaaactcccaggagtctatctgctggggtgaggatgctaagtccttcactgctgactcactccagaaagtttctccctatgatcttgatcaacctatagatactgatctagtttaagacattaggaaacatcccccctaccaaattgtatgcttgcaggtctttcttagacctttgacaacttaaaagtcaagattctctacttttgtctctgtgttccctaatattcctattcaaaagagttggaggagttgagtgggcgaagtttaactctacggcccagagatgggaggtggggaaagaaatgcctttaaggtgaaattgaaatacacaatgtggccggtgttgtgtcgcacacctttaatcccagcactcaggagacagaggcaggtggatctctgtgagttccaagcgagcctggtctccataatgagttccaggacaggctccaaagcaatacagagaaaccctgtcttgaaaaaacaaaaacaaacaaacaaaagaaatatacaatttggtaggggggaaagaatatttattttctttttctgatctgtttctctacccttcctcttgttttataatttcctgattacatcacagaaggactgagtcatgagactgtctcatattgaataatcattgctaaattatttatttctaatcaaacaggaataaataaatgccacagccagtattcattctatacatatcctttaaatcattggaacatataaatagggggccttaagcttaagaagttgtcattccacccctataataagaaagaaaaaggcagacgatcagtaaacaaaattttctttgtctcatcatagaagtgaagttgcaggccaaattctgacctgaacatttggtgagacactttatccagagagatacagctgatcttacccagagccacagacactgcagccataagtaggaatagttaactgtaatgttgatgaattgctgcaggcagagcacagaccaacttgaaagtgagaaaaccctgggggttatgatgtagcaggagctgacacacatttttgaggtttgcatacagaaaccccacaagattctcttgataaagattcaggaaccatctttattctggcaggagaaagaattaatcattttgaaatatagccagctggttcttcagagcaaaggcctgcattttatttcacagagagcaatactgccagagccttatctcagctcagagaaggaaacttctcctctgcccagtcacctgaatccttcccatctccacaaagctggaaggataggcagcaagggtcaggactccagataaactaatgaggaattttcaggcatgagagaaattagattactagaagaaaataattctacttctggagaaacacatatgacagtcacagacccaaaacatggagcaacccaaaataatcaaacaggaagataatagaacatctttcacccaattcatctcccccctctctctctccctctttctctctctctctctctctctctctctctctctctctctctctctctctctctctctctctctctctctctctgtgtgtgtgtgtgtgtattcatgtctatacatttttgtctgtgtatgtgcatacactctgtgcacaaacatttggaggccaggtgttgatgtcaagtgtctttctcagttactccccattttttttgttttgagacagtaggtctcttactgaacctgaagctgaatgatttaagtagattggctggccaggaggcaccagggattcacctgtctctaccttgacagcactggaattacagatgtgcactgctgcctctgatgtttcgtgtgatttctggagattcaaactcatcttcatgctcacccagcaagcactttactaatgagccatctctttcaagtatatcttgtactttgaccttgatcattcatctttacctcacctgtcaccctttcctaatgtccttctttgttccaggtagcccctcttctatcattccagctataatggaaacagcgcgacactttgccttctgtgtatggcttatttcacttaacatgatgatttcaagttccaccattttcctgaaaatagcataatttcagaacaacaccatgctggcacaaacagacatgtagagaaatggaatcaaataggaggcccagaagataaactcactgctactaccacatgacttttgacaaatatgccaaaaacacaactgacggccctcttagcaaatgaggctaagaaactagatatgcacatgcagaagaatgaaactagactcttatacctccatattattattctacatatatacacacacacatatatatatgtgtattcatagatgtaattcaaaatggatcagagatcttctttgtttctttgttttttttcaatataatatttttattgattatttaggagtttcacataatgcaccctcatcacatttaccacccagtctccctaggtccacttcctttcccttgtgaactacccaaagaaaagaagaatgaaaaaaatatactaagtctgatttgtgttgcccacatactcactggagcatggtcaaacttccagtggctagccccttaaagaaaattgagttcttctccacctgcacctctgccagaagcttcaactgtgaagagctacatttcaggatccctatcacaatttttaggagttctcttcaatggcttcctatctagactgatttgggtgttgtcacaagagccttctctatgactctcattctcaactttgagtccgcaggcatcaataacactgaaaaggaagcacccttacccattacattcaccagcagcatggagcatggatttccacatgctttctggtggcagtacagaccatagacatcagtggatccctttccctcagcaaggacatcagacacaatcatagctcttggcagcagtgcaggccactgacgccaatatgacttcagacagtagcacagaccatggagatccatatgatcctcaacagcagcaggggcaacagacctcaatatggtctctggcagcagaacagacatgggcatcaacatggcctttggtagtaacatggaccatgaatatcaacatggcttcaagtggtagacagaccacaaacatccacacagggcagcagtaccatgagcaccaatgtggcctcaggcaatagtacaagccacatacatcaacatggcccccagcagaatcaggaaccatggacatccacatggcctttggtgtcaactcgggccacagacaccttaatataagacctgaaactttgaaagtgttagaaggaaacagagaaaccactataaagatacatgcacaggcaaggacttaagaagaaaattctcattagctcagaaaataatagcaagaattgacaaatgaaattaatatattcagctgagtgaagagacagcctacagaatggaagggaactttttgccaagtatacatccaacagggcattaataagtgggatgtatgacgatctccctccattctttatgtgtctgcaggttcacagatcatcactgcagatctcagcagagagggccacaggatacagatactatgaggaggacggggaaaatgacaggaaaactgggcagcatgaagcctctgtcagtttctagccaagagaacctcaatccttacatcaaagtcctatttccaccactccatgtcacctgaaacaaaacgtgtggctgttgaccaaaaatcacaaggcatggtgaaaataaagcaaatattaaaagaaaaagaacaaaagatcatcagatcatcagactggatccagttatatcagataccagcattacctgcctggtcattctagtcaccatggaaactaaaactatgtttcaaaggatctaaaagaatgaattgatgacatatcaaaagtcacgggcaatctgagagtcggaaagcctaagaaaggaaaaaatgaagaaattctagaaatgaaaggtaacaaaatggaaaatgacttccatggattaattgtcagacccaacacagacaaggagggagccactgagctgtcaagtttgtcaataggaacatcccaaactgaaatataagaagaaaacaaatacataagaactaagggacacagaccaaacaaaaggaatagacaagcaagagaatggaaataatggacatcaagctaccaatcttgggctcttgcagaactccaagaagtgaaagtgtcaccatcacaaaagcaaaaacaaacagttggaaatcctgtgacttcagaatggtgctcagaacaaacaaccaagaggaaatctttaatgaagccatagggaggaaattgccttcctgatggagaacaaaggaagcattaacactgacttcttgtcagataccacataagagggaaggggagagatagagcaaagcatgtggagatatttgaagttcttaaagaaaaatctacccacatagaattctgtaaagagcaaagttattcttcaaatgtgaaaaggaaatactttctcagacaaaaacaaagtcaaacaaataaacaaaatccctaaaggaattcattgccaatagacctgccatttgagaaatgttaacgtagtttattattcatgaagagggaaataacataggtcagaaatctgtgtaaacaaaaagaaaaacataaaatagggaaggaagacatggacataaatgaaaatctcttttttcttttcttatgtataatcaacctaaaatataactgtttgttcaaaacaataaaagtaccatggctaggttagtgaaagaatgacagcagtatcaaaaggaataaaaaggaaggactgttctaaaatctataaacacgtgaagcagcatggtttgtctcgaacatggactgaaattaatttaaaatgcacatggtaaattctatggtaacaagattgttaatgaaaattggcatgctaaggaaattgaaacattttcagtgtataaaacactcacctccacaaaacacaaaatgagtaaaatctaattaatagaaaacaattataaatattatatctaacccaaacacatcgtagttaaaaggcatattgatggtatgggttaaaaaaatagtactgatcatgggcatggtggcacacttctttaatcctagaattcaggaggctgaggcagggagatctctgtaagtccaaggctatcctggtctacatagcaaacatcaggctagccaaagctatgtggtgagaccttgtttaaaaagaaaaacaggaaccacaggttctatctaaaaagaaatctattcagacagattagacataatgaaatggaaaaagatgtaccatgataacactagttcaaaagaagttactccaaccatttagattacagataagctgtattcagaaccagaaagacatagaagataaagtagactattatataatgatgaggtatgaatatgcaattctgcattgagaaaaaacatgttatttctgtaagaaaatgtaaaagtccatgtatttaatcaaaaaagcatcaaaacagatgaagcaaaaactgaactgaaaagacagagacacatggatcagagtggagccctgtaataccctctgtcagtaattcagatatttaatagacaaaatgtcagtaggaatggagaggaagtgaacagagctatccatcactttacctaattgacatttacagactaatccacccaacaatggtgaaataaacatccttctcaagtccagctgaaattcatcaagatgagagcattctgagccacaagccacacattagaaaatgcaagaaactagaaactacatatatattctcagatcattgtgaaattaaatcagaattcagtaaaggaggatgactaaaaaattctaaaccattttggaagttctcaataatccatgggttaaagaagtctggggggaaaagggttgttttgcgacaaggtctcgctatttatcccaagttgtcttcaaattctgtctttcagcccagcgtacccacatgctggagttacagtggtacatcgccacaccagccaaggacattttttaaaaattattctgaactgatgaccatggagatacaatttatcagaagtagggggacacaggagaaagtggtacatgaaataaaacagagagccttcaatttataatatagaaagaagaaatatctgccatcaataacccaatccttgtcttaggaaatatgagcaaattaagctttaattaaacagaagaaagagaaatattagagtataaatcaacaaaattacaataagaaaaaacaataatgaaaatcaacaaagcctaaggctgattctctgagaagatctataaaattgataaacaactgggcagcctcactgtgaagaagaaaataaagaaggaaattagcaattccttgaatgaaagggtcaaactactgacactttcatgaccgtgatagactgtgatgggatttccatgcctagaaatttggtaacttagctgcaacaggtggattccttggaagattcaaaatacctcaactcattacctgaaaaagaaacttcagccaggcctaaaggctctaatcgcagcactcaggaagcagggagaggagaacctgaagtcccaggccaacctgggccacccagttacaacccacttaaaaaaaaaaaaaaagaaagaaagaaagaaaaaaaaagaaaaatctgaggattgtagcatggtcctgcattataagcatttggagggagaaggcaggaagatcaggagttcaagatcagcctctgcctcatagactgaagggcagcatgggctgtatgagaccttctcacagtaaacaaataaaaagagagacgaagaaaagaaaactcatgctcgtataaactgatgcaggagaatcccttaactaaccaccatcattcacaatttttcaccaagttagaatagaaagaactatctcaactttatttttaaaaaatttaacacaattgcctggcatcatatttaatgttgagaaacaggtcgtttaccttccatgatcacgagcaaggaagccgcatgcttctgaaatgcccttatggtgaagtaaggcaaggggaaaagcacggatacgggcaagctgtagctttgttcctgattgaaatgactttatttaacacacctgcaaggaatttctaaaaccagcaagcaaggatggtgatggcacagaatatgggggcaaaacacaaagccagatcagctggcttactaacaataagaaggtagaagttaaattttaaaaaatgtaaaaaaataccaaaataataaaatggaaattcaaaatgtttagcatgaattcttttatagaaaacactgatacacaggttgcattaacactgatatttgcatcagcctaggatacttaatgataacatgtattgaaacaataaataaataaatctttatggctataaaaatcagtctatggaactgagaagaaatcctagttgattaaacagaatgaccggtgttctctgcctcttggtttaaagacttattattaagaaatcaaagcaaattgcatagtaattaagtgtttggttattcaatactgactacttggcaagaaaaatattttttatgagaagacttatgacttctatttagtttaattctaaatgtctgtaaatcaaaagacacttcttaaagccttggtacatctcaaatagggctaagggtgctgaaagacctacaaacagcaaattattgacaacaagattgtataaagaatttataaaacccacagaaacagctgacttgaacaagggaaaactcttggtccccagactgatagctgggaaaccagcatgggactgatccagaccccctgaatgtgggtgtcagtgaggaaaccttggaaatctacggggccccttgtagtggatcagtacttatcagtagcataggaatggactttgggagcccatcccacatggagggatactccctgagcctagactcaagggggttggcctaggccttatccccaaaggatatgacagactttgaagactccctatggaaggcttcacccttcctagggagcagaaagggtatggcattagttaggggagcaggggaggagaggagggagagggacctgggattgatatgtaaaataattttctttctaataaaaaaagaaattacccacttgaaaaaatttttaaatgtatcataaaagaaaatttatcacagtagaaatatgaaaggccaagagacagttcagaaataaattctcagaaaaatagctagctaattaaaaatacaatgaagtcaggcaggttaggttaggtggcacatgcctttaatccaagcactggggatgcagaggcaggcgatctctgtaagttcccgagaccagtctggtttacaagagctagttccaggacaggctccacagccacagagaaaccctgtctaaaaaaaaaaatacaatgaagtctattcatatccacaaaagctataaaaattaaaagtctaacaatattgaacaaagtatagtgatttaaaaacccctcatgtcgatcaaacaggagcattgtcaaagaacatgagatcagtaaattcattgccttttaagttttaaaatggttttgcaaactagtgatgattcatagaattaataaatattttaacaaaataagtatgacattttcataaatcctgcttcacaatgctacgcatgaatattttctgtatatatcaaacagtaggacaaagaaataagtaaaaacttcaaccttttactttaaaagcagtatactgagttttttagtgaatatagccaaagtagtctacactattatagaaactatctttctaatatttaagctgtctgctaatttatcaactgtgagagactcaaaaatatgtcacatgtttttatattttacattttaaattagtaatattttgtctaaagttaaatatccctttgggatttttctctaaattattagttatttgtatcaaccaattcaggtaaaataaaacaaaggaattcttgctttttctcaacatttggaaaaaataagtctttgatgttgttagaatagttttaaccttatgactaattattagtttaattcaaggttttatttttttataaaattgcacattgttgaccttgcttttttttctaagaaaactttatatggaaatatgaagttgtaaaatagtgcagctcacacctttcttagagttagagttttgttgacataaccagagcttcatatgcccttgcaagaaatattgcagagaatatagaggaatcccatggaagcttcaccagagagagagagagagagagagagagagagagagagagagagagagagagagacatatagaaaactattgtgtggtatctcaaccagagtattgacatttattttgataaacaatttaaagacatacctattaccacaaggatcctttgtgttcaacatttgaaaccatacccactttcctaccatccatactcttaaccaatgacaaatattggcttcttcccactttgtacaattaccttgtttctaggttgttacacaaacaatcaaagttcaacatccttccttgggtttatctgtcatatgaatatactcttcattgaagggtttacctagcttaccaaacctaattctaatttgaatttttcatttttaaattttagaaccccgacacatacataatttttaggtatatcttctaacatagtcaccactgaccgcgataccagtctcctgagaatcctttatacagtttagatgctggtcctcaggtctctggtatgcatttcctcgaagcttagactgttttttttttatcctgttaacggattttccataaagtcgagtcttcattttgctaaaatccaatttatcatcttccctttgtgaatcatatttcactacccattcaaagaattctttctagaattagaccctaaatattttctctcatttttgtcttaaaagtttgtagctgtgtgtcttgtatttgcctcgatgtctcattatgattctcattttttatttaagaaatgagacttacattgaactcttttttttgccaacaaatctctagtatcccaggactagttgttaaagtggattgtcatttttttgcactgagtagcttcttagattttgccaaaaagaaatgggacacagacatggacacacgaacacacacacacacacacacacacacacacacacacatacacacacacacagagagagagagagagagagagttctccattatgttcttctttttcttttccaagatcctttcttcaaatcacttatttttaactctgtttccatctatgttgcatccatacagtgaagattttccagttctggactgcccatctggatctgctacttaccttccccctttttcctgaccctcttgttcctctgtgcatgtaaagcatgctcacaactgctcctgaaccccagggctttaaaccctctgctggccaattctcacatgtatgccttcttgtaattggactccattctggctttcactgcccactttgaaagcatggtggttctgaatcaagcacatcaagtttcattgaaacagggtattttgtgttatgctgtgagatttgtagtcaggtttaagtgttctgggttaggctgcttttctttctgatacctcaaatcatgggagatgcctccttggttcatgtagtctcccacatatagaaggtttagtcggttccctggagtctccacagttgtgggtcaagagttcatgagtttccacgagtttggttcagctgtctctgtagagttcttcaacatgatcctgacctcccttgctcatatattccttgccccctctccttgactggatccccagagcttgacttggtgcttggttgtggatctctgcatcttgttccatcgaatattggatgaaggctctaagatgatagttggggtattcaccaatctgattagaggggtaagccagtacagctatcctctctgctattgctaggagttttagttggggtcatccttgtggattcctggtcgaggggagaaagatggagtggaacagcaataaaagagatatcttaatagagagaaccactatggggtcagcaagaaatttggtgctaggaactcacttcttatgctcagtttaagaatagagatatgcatgaaatctgctgaatatctcaatcatttgttcattttagatatccaatggcattccttctatgaatgaaactctttcatttgtttttttaatccatgaaagagatatgcattgtctttatttgggagcagttataaaaagagctgctataagcaatctgtcagagtttctgtagacatcagtttcaatccatttggttaaatagcaaggaatgagcatacatttcatttcataggaagctaccaactgttttccagattggatacaccatttttccatgaaaataaattaattctagtttctctgcaccagttgttatagcaatttatttttaagttgagatggggttcctttgtatagccttggctgtcctggaactagttctgtagaccaggatggcctcgaatttacagagctggaattaaaggagtgtgccactaccacccaacttccttccttttttggcttctctgatatatatgtagttttctacagaagcttaactcaatctttctctaaggcataataacattggaaggcttttcatgtgttaatttgccatccttgtgtttctgaggcagaacatatattcaaatattttatcatcttcaacttgactgtctatttttgaatattgagaatcattgtattttgtatacaagtctattgtcaaatatataatttgaaaatatcttttctagtctaatggtagcttttattctctttataattgttttcacaaaacaaaagtttcaattctgatgaagtgtcaatttcccctttctggttgtgcttttgttgttatttctaaaaacttttcaattccagtttaggaagattttatggtaaacaatatatagattacgatttaatatcaattttagatgcactttgttttcaacatatagatatctacttgtcaaagaatccttgctgaaacattatctccttcccaactaaattgtctatgcagcttcatcaaaaccaaccatgcatatctgtgtataatgggatgatcctacttaggaatattctgtcccttctaagattgccttccctttgtacctttgtattgactaatgttggtcccctagaatttatctttctcttattcacttatttctaggaattttagcaacaataatttcattcataggttctgttgtcttcagtcttcttgaaagtgggatggaatatccctgaggctagttactctccactacacaggagcagagatgtatgtgtttattctgactgagccctcaggatgcctagttatcctgcagccatcttctagacattacaattgggaggagaaaacaagctgtttctccaactctcctctttaacctttatcccctataagatccttccctgaagttttctcacataaatggctcttgtggtcctttgaccctaacaaatctgagggtaaggaagtacaggagccttactccgagaattcatactgcacttggagtacaattccatctttaaaaatgtcaacagccatgagagactgcaattctagggtattgattgaaaattccaaaataatccatttatttcatattacaatctattttgggtgacttaatgaaaccttgagccagtctcagttatccagccttacacttgagtcccctgtttgtccagtgttcccatgccttggatacattattcacttggttgttatctccattttcatatcgattgtgggcacactacagtcttaatgcttaaataacttttagttattccatatatgtctcgaacacacacaaaaacttttatgctgcaaattcagatatggaacagagacaccataggagtttcaattaagtaaagagatggaagttcctaagtgagaaaggaaaaatatgcaagctgaagttgctaagatctgcaataagaaggagtcttttaactgtgaaattgtgaaaaaggaaagaaattcatgcctgcataattattgcacctcagagcgaaaacttgcagtcacagaaaaatcacagatgcatagttgttatggaaaagacatcaactcatgtggcatgtgtgtgtgtgtgtgtgtgtgtgtgtgtgtgtgtgtgtgtgtgtgtgtgtgtgtctgtgtgtctgtgtgtgtgtgtactcaagtgcatatactttctcctgtgtggtgcataggcacacatgtataaatgagtgagtgagtgtaaaaaaaaataataattgaatggagtttgggaatccatgagacttgagatgcagagctaccccttggaataagacggggctccagtaaattttattttaaaagttaaatcaaagctacttgcatcaaaaatggcatagaaggaagcagcagaaatgattgatcactcattctcagcacaagatgattcatatagctatgaaataagagtaggctgcattgtgaacttgagtttgggatgattcagacttcaagtggaaatactcaacagaaagttagaaacatgggagagacaacatagaggaaacattgagactgggtgatctctgagagagaaaagcaaaggactaaggactgaaacaggaaattactaagtagcactcaagtgtgtggctgaagagcatgaaggaagtatgtcaaagtaaataggaaagagctcattgaaagaagccaagagctttcttctactccaagtattaaattaatttaatgtagcaaaggttatgttaattgctacactttgtttgcagttgttcttgtattttctctgctcacagcatctattggcctcgtgttaccctatcttctgaataaagaagaaatttttttctattctctggggtctgagaaagacaaacaatgaagttttacactagaaaatttagcataaaataaaacatacaggaagggattcataaattattaaaatctatatggactttactaagtatgtttatatgatttttttcttctactactattgagttggcatagaaaggtcacaatttgttaacatacccaaagatttttttaacagtactacagatttcataacatatttaacatatgcaaaatattctttcatgggtgtatctatatttacttagtcaatcacagatttttttaatatatgaattgccagctgaatatttttatataaaaatagtcatagaatattgtacctcccagtttttaagagaatccattattattcaattgtgtatgaaacttatttactgttaacctcaacgtcttttgggcacataaactcttcctgcaaagttcttaccacgtacaaaaatggtccaacaactctgcttctgggtaatgaacacaaatctgtggttaatccttctcctttggtgcattcgtcccaaatctctcttctaataactccgttctttattttttttttcctcttgaagcatcccaattacattcagtcattttttttactatgaagttcactgggtttggtttttactggtagaccacgtagccaggagagaagagcaagtgtcattatgagatccaggtatttggatcaatgagctgtttgcgtggggtgttagttacatcgaggcttttctgatgttttcccttaggatgtactacttctaataaaatgtgcactcatgaacagggatatgcagactacaaagcagacagtcataattatatggtaaaaatgtattgattaataattataacatctctttaaacgaggcatttttaagaaaataaataaaggtgtttattttctgcaaatattgtggtttacaaaggaaggtgtggattttctctacaaatatctatctctctctgcttcttgtcctgtgctttaccagacttcagtttttgcctcccttgtcattcagtctctaaattctggtactgctcttcagttggggcctgctgtgaatcaatgggcatgaggcatggggctgatctactacaaaggcctatgctacaagtgagtcactcagtcttacaggtttaaaacagacctgactgacactaggcagctccctagtcagtagttaatctcatgcaggtagacatactaaaataccgactacggctccaagactaattagtacattagctaaaattccggaagaaatgagaaagaatcattcggtgggataagaaaaactggcataattttaggatttaattttaaagttgttttgaaatcacaaaacaaaggcatgaggaagaaatggcaaatgcaagaacagaagccacagttctaatacatccactgtaatctagccacagtgatgtcaccagcaggggatggagacatggtatcaagtccttttttaccagatgacttatgctaacatcatttccattattgtgaatgtttctattttttgttttgtgaactgatctcattgtttatcctaggtgggcttagaaatcattatgtatgctagggtgaccctgaactcatgaaaaccttcctgcctcagtctcctgaatcctaggattgcatgtgtgagctactataccaggctccatccgaatatttgcatgacctttgtcctgtgcatttccctggactaagttttgacatatttttcataaagctatataccacaggctaaaaccttcagtcaacttcacaagcaataagatgcctgacatggttctcccctctgccaccaacctcttatcctgtcactttcatgactcagaccctccagccacaatcccttccttctgggtttcaataattagaaacttaaccccagctttggcttttcaacttcccacactgtcttgtcaaacttgcttccacccccagattggacaatggtaatctgtaaaccaaatctgatctctcactcccagctggctttgtacatcgggttttatggtacatcatcacccaattcctttgtatactgtcactagccctttcacactacagttgcagggctgaatggtacagattgagaagttttgaatatttactatctggacttccataggaggaaaaagttgttatatccaaataagtgcccccagatcagagactagctgcttctgccggttatcataagacaatctcatcacagctgtacaatgaaaggagatgctttctgtcaccacacagtatgaagtatttcattttacacagaacattgtatcaccctacattgatgtcccttatttaccatttgcttgtttatctgactcttatatgtgcgttgaggttcataacattcagtgtaacacttcagaattagtgacaaaatacctcttgagaaatactttttgtaaatgattccagtaattgaatacatggattttgctgctcaaaaactcatgatgtccccattacattatgattcttccactagcaactgcaaagaacaaccaacattgaaatagaacagcaataagaattagtcttgctcagttcttcagatctcttttatatacagttataatgactattttcatgctttctagtgtttctgtacccaagatacttggcttaaagctactattgtgttacagttggtgtcctgggctggagaagatggctcattggtttaaaaaaaaaaacactggaccactgctcttccagaggacctaggttcaattcccagcacccaaatggccgttcacaaaggtctacaattcaagttctagaggattcaacccttttttacttccttggacaccagtcaagcacaaattgcatataagtacaagtagaaaaaataatcaaacacataaactaaattgtttaaagagagagagagtttgtgtcctcccaaattttacaggttgggacattatacccaatctgataatattaagaagtaggctctatggaagatgactgcataatgagaaatccactctgatgaatgagatgttcataaaaatagtttaataagctctcttgccccctcagtcatataaggacacagaatcttctttgagattaaaccctcatcaaacaccctatagttttcagactgtgaacaatgaatttcacaggctcaggtattttattatagcatcttaagtggactaaggcaaaatattacagacaagataattgcccatgatcatgatgaagccgggtacaaagacagtgaagttgtggtaacatggagaaaagagcatcacatcctgaagtctacttgaagcctcatatcaaccagaataaaaaaaaatacaacacaatcaacaacatttgctatgaaagttgacaacacaaaacaatattccttcatatatatatatatatatatatatatatatatatatatatatcagatgggtagacagatgaaagagacagattgttgtggaatatttgcttacactgtaaagatgtatctctgcataaggtaccttctgattggtttaataaagagctaatggcccaatagctaggtaggagagaataagtggaacttccagggagagaaaggactgtgggaggaagagaggcagagacaccagcaagatgcagaacaaattggacatacggtacatacatacatacattaatagaaacacattaatttaagttttaagagctagttggggaaaaacctaagctaaggccaaccttttataattagcaagtctctatgtccttatttgtgtgctggtggccctaatacaagaaatatttcattttaaatttgcaatgaatcttgcttaagacctgaatgcatatgcattgaataggaactcattccttcccccaaaacattgcttaaccatctcaaattgcctaagcataaggtaaacaaaggtatcaataatagacatgtcaaagttgaaagagaaaagcccagaaagcctcaaccctacacaaaggactgcaagcaactaagaaatgctgagaaaaatactcttcagagatgaccaactggctgtccaacagcaccctgaggatgtgcgtgcaagcagcattgttcagactgagtgagttatgcttgggtatacatgtgtatatgcatatacatatatgcatgtcacaacaattaaaggctattaatttgaaagagaacaagcgggtatctaggaaggtttggagagaagaaagttcaggcgaaaatgatacatgataactgcaaaaataacagaaggaaaacaggtgaattttgtttataataagaatatccaatgcttgtgtccctgtgagccagattttatcttatcaattataattttgtctgatgcaccacaggaaaaaacctggttccttagcagccatttgaacattagtaacttcaaatcacaccaaaatcttatatatgacttgtatggagaaaaaaatccataaagtgtgactctcactgagagaagcccatactcatgcttgtaggtgtcttatttttctccctggatgcctaccctcgtgcttaagcctattcaagtcctgtgtgtgtgtgtgtgtgtgtgtgtgtgtgtgtgtgtgtgtgtgtgtgtgtgtgtgtctgtatgtgtgtgtgtgcaaatgtacatttctatgcattctgagaccagaggacatagggtgtcctgctctatcactctacaccttattcttttgagcctgggtttcttgctgagcctggagcctaggctggcaaccaggaagcccacagtgatcctcttatctctacaaagttccctcccatctctagacttcagacatttgtgcagccatgtcagctttttttctttattacaatactgctggctaattgactaggatttcttttatgctagctcagtcttaattatcataaatgtatatattttataagacttatcttaccaaggaccccttctgctggtcctcttcctgggatcacatggcggctctgtagaaaggagagccggaggaagagaaagagatagagcatgacttcctgcttgtccttgcttaaattctgaatctgcctgctatgtcacttcctgcctggatcaccagacttctcagaattctcctaaactcctagtctcacgtatcttgctccccctattgactaacagtgatttattcaacaaccaataagataaacatatacacagaaggacctccccatcatctcctcttttctttctaaataaaaagaagggtaacttatcttttataataactgaaaaaattatagctataactatctgtcttcaactccatcaaagaccacagaaggataatatataaactctagaattgacagagacatcctgctacctggagagtcacccaaagttcctctgtaccgttggggcatccatcttcagcctataggccatagtgtgtctagcacacttctccatttcagcaggaacccttcaggactgttcatcttgttttgtaagttcagcagtcactttttgtgggtcctgcatgtccactttatagagcaacaaacagtccaggcaagagcagtttcttgtccaaatggctaatcttgccatgttgaaggcaaactccataatgagtttcttcgatgcccatccccctttctgacataattgacgtgctaggaatagttgtgtctcactgtcaagaaaagccctaaaccatttcaatatcatatattctgttggtctttgaagggtttgaaaatatctatccatctcaaatgcatctctgtatagctagaaaacctaactaacctaattaaaagtttcatttaaatggagttggttataaatggtaatgattacagtcaatctccttttaaaagaaaaaaaaggaataggatatggagatgaataatttacattggtatggattttcatttattgatacaaccttaaggtcaattttgtgatatgtaaatttctcctcttgttcaggtattgtgtttatacagatcttttaaaatgtaatgcataattaaatatagattatatagtcacctatagtagccatgccagctttttacatgagtgatgagaggtctgacctcaggtccttgtgcatagatagcaagcattcctctccaatgagccatttccatggctcatacaatacatttattaaactccaactctactactgactgctactgtgttagttacctctttctattgttgtgataaagcaccatggacaaaacaacttatagaagcaaaaggttgtttgctcttacagttccagcaggtcaagttcatggtggcagagggggaacatgaaaacacatcttgaacagaaagcacaagcagggtcattaaacttgaaatgacccatgtctttgaaacctcaaagcctgacactaatggcatactccaccagcaaggccacaccttctaaacctatgcaaacagtgccgccaactagggaccaagtatacaaacatctgatcctactggggaaattctcatctgagatagtttctgtgctgaagccacaagttgcaatttggctagtgtcaatgttcctaactctccgggctgctgaagtcgatatgtagacctttgcctcctgcctctgtcccccacaatgctgacactgacaatcttcctcttttatattttatttatcttaagttttatttcataatcctttcttttgctatctaagtaaagaactggtagtaagttgggtcagcccatccctgagaaagtgcatcccaaaagcctattggtttcctttagatcatcattaaaaaataagatacgtaaagcccttggtaagcctaattgctaacaatagctcttagttatccctaaatatgtaatgtactattaagtaagtcttgcttggggtcagactggctctaattagttcagacatccgcaatttatagagctgtgaactaggaagtaggattagatcatcccaataataagaaaccctgtgctttacaatgactttcaggtagcaagcatatggagtgtaagaggctgagatcacattgatggaattagtgctgcttgtattttgtgaaaaattcttaatattttgagccttagtttactgtttaaaaataatggtgcccttctcttctgtagctaggaattacagtgcactaattgcatgtaaagcacttagagctgtaccttgctaatagatggaaaacacttagaatgtgctgtagtttcgatatatttatggaagtaagacactattacattgttatatttttatgaagctattatgctaggaaatgggacatactagagataaatttcagagaactgggagggcagaggaaagctgataacatgagccaacaaatgagctcatgcacccaaaattagcatggatttccaacatgaactatggcctatcaaaaaaaaaaacttgttctcagggggactattatcaaggatctattattaaggagctctgcgtagtaggatagagaagaaaaatatgagtggccctattcctttgagctgataaacagcttttgatacttgaactcacaatgaaatctgccttcttagaaataagattttgaaaggaaggtgtaagttgcaggtaggccacatcagtcaaaacttgataacaaggtggctatctcatgttaagaagacttagagcatggtaaacctttaccattttttttatatttaccaaatttcatagtactgaaaacctttactttccaaacatatccaatttattctgtgtaatgaaatgaataaaatcatattcacccaaattcctctcagggagactttgtatttattcaaaaggaattactttctttggagtatgagaccctaaggaaatgctcaagtaacacaatatagcaattaaattgttctgcctaatgaagggataaaggattttaacaagagagtaacttagaaagggaaaaagggggccaagtgaggcaggaagatactgggggattggaagggagaagcaggaaggacatggagaagctcttggcttagtaacagagaggtgtaagaaaacattaaaatgtctaattgtagttcacatgcttgctctgagcctgcagaaggaagccctttgtctctcgtccctaagagattggaggatgtatttgtgttgctcacttgtattgattattttgaagaccagatgagatgctgagttgtgtgttcaggtggatccaaggataaaagagactattgcagacactcataactcagagagcagagcaaaaaagctatccaagtcagagagccatatttctttagaacttctcataatgtttttaatgaagctttaaaagtgtctcatctgtactataatgtagaaaattaagaccagagagataagaaaatccacagcgcaatagaagtgctcacaagggggagacagaaacttagaaggtagcacttaggaaatagttctgcagccttctcaacaccattccccctccagaaacatagtttaaagcttattcattagtgaatgctatcctttttaaaaattgatgatactgttattcaaaagaaatataatgaaaatcacatatgtaaccattcacatggtaacagaattttcaatatgtggacataaggaagtaaaatttaattttaataatgtattttatttaagccaatatttctaaagtatcatttcatcatgtaattagaatattattatcaatgagaaactttaatttcttaaactacctttagaatcccatgctacttttacatttgtagcatgctcaattccaactgacctcattttaacttctctatcccaccatgctacaaagtatgtatcgaaggggtcaacctttaagcagtgattacccaaaaaagcaaaagtggttttcaattgtacaaagtgactacgaatccatgtttataatattagttttatgtttacatttgtaaatttggtactcttggataatggagagtttaaggaggaataccaaagagctgctgagcactaactacaagtggctatagaaatctatgtccacaaatcatcagacacttactcatttttaaaacacctttctttaatttgatgaaggatcactactgaaatggaacatatggagttgtgcccaatatccacttcattcttccagtttgtctttctgaagggtagagactggaaaaccaaaatctgttatttctgtctctgtctctgtctctgtctctgtctctctctctctctctgtgtgtgtgtgtgtgtctatctgtctgtctctctctgtctctgtgtgtgtgtctctctctgtctctctgtctatctctctgtctgtctctctgtctctccgtctgtctctccatctgtctctctgtctgtctgtctgtctctctctctgtctctctctctctctctctctctctctctctctctctctctctctctctctctctccttctgtactgtctatggatccagatgtagaaatttcaactcctctcaagcactaggtctagctgcaggtcaccctgacccctctggttattcaataatgggtctcaagtaagtatggcactgttcatcaaggtaactaaataaaatctggctgtaagttattatatgggactttttccataaaatggaatggccaacaattctttcccataaaacaaaattatattagactttgcattatatgctgacagcatcttatcatatctgaggagggaagccagaccctccttgcagcaaaatgctctgctggtaaaatcaaacactatacaattcagaagcagccttctagatggagtattgaaatggccttctaaaaatatattgaagaataaactcagaatcaatcctttctcagaacacgatgcttctcttccagaatgcagtgtgggtgctgggttggggacttctatatagtgctttgtccacagtaggaaaaatcatggtttgagaacaggagtgtaaacagtagtagccccactcatcatctttttcagtcgcccctgggatgtatttgtgcttactgtctggtgattctggactgtgtatcattggataccccgatccccaaaaggtacacacaaggcagaccgtacattgaaggtgggattgagttgcaagctagactgccacttgcatgttttggcatacttatgtctatgggcccaggagtgagaataagatctatcctgttgatcaggctgataagcattgatttgtaggaagccatgaaacaatatgtgtgatacctagtgttctatttagccttgtttcatccattccctttcatagttaaactaacagttgtgtacttctttaacttttatatccatcttatgttctgctccttgaaggactcaagtaaaacacgtgaaaattaattatttatttttcatatgttttatggtaaaagatcataagcaaacacattaaaacattatttctaatgtaataacacaggacaggggaataatgagtgatatgtgtgtcattatttatagcttgggttggtaaatcttcttaaggagagcatcaatatgagcatattcagacataacaacaatatatgagctgtgcaaaccaatgcttgaagagattaaggaagttaacttttaaaaatcttttttatagtgatttttaaattaaattagaaacaatcttgttttacatgtgaatcccagttccctcttcctcccttcctcccctgccctccactaacccccctatcccatcccctttctgctcctcaggaagggtgaggcctttcataggggatcttaaaagtctgtcatatcatttggagcagggcctaggcccttgcccatgtgtctaggctgagagagtatctctctatgtggaatggactcccaaagtccattcgtatgctagggataaatactgatccaccaccagaagccccatagattgcccaggcctcctaactgacaacgacgttcaggaggtctggatcagtcctatgctgatttcccagctatcattctgggggccaagagttcccccttgttcaggtcagctgtttctgtgggtttctccagtctggtcttgacccctttgctcatcattcctccctctctgcaactggaaaggaagctaacttttatctcctttcacaatcgccaccgtggctgctccacaccaccaacattgactctgtttactctgtttaataacaatagatatgtcaaccttgataggggaaagaccacaaaattcaaccaagaaatgctgagagtggtagaaatacttatcctcagggaatagtataccaagtggttatccaatgccaaatggtcagtattgaaaacatacatacaagtaacattgtacacacagagcaggttgtatttaggaatatatatgaaaatgaatacatgtatgtaacaacaattaattaaatagacaccatggattttaaagagagcaagaagaagtatatggcagggtttggagaggggaaatgatataattatattacaatctcaaaattagaagaagtaattaaaaagaataatgacctggtgtcctacttaacaggaatagcaagacatcagattgtttgataggaaaaattctttcaaatccctttccttaattttattgcctgagaccctctctttggaagaggagtctgctctcgtggccaacactaatctttccatttgtaactgaagacaagcagagtagtggtgttctcaactgccatgagaaaaattatgcatttctgcctccagggaacactgccattttcaaagtatgaatcagaaattgctgatgcttcataaaataagacagatgaatctcagtgccatattgccaaaggccatgctcagtagagtgttccttaatttatcatttagtgagtacctgcttgtatgtcttgtgttagcagtaataatagaaagatagccaggaccccaaatttccagccagctgtctcttgctatggattcttaatggggagtttaatacgtagacaatgctctgaaaaattgtatacagttgtccccaaatatagtacagtgttttacttcaatgaccaaggttggctcacatgtgttgcctaaaatgtccttcatattgtccaatggggtatagatttaaagacttatgtcaatctctttgacattttaccatgtccactccaggaatatgaccaaatggagtatttgtttgtcaaaatagtaaaaagaagcccagaaagatgttcataagcacagaatttgtatttttctcaggcccagagtgtattgatccaaggagatcactccaggatttttcctctaattggtggccttcctggttttgatgacctcttccctggtagagggagctctgaagccaagccagaagaagtggtactactagtgccctagccttggaaatatgagagaaaacagcaacaattctgatgaccgtcctcaagaagcatagtaagatgtatccacttctctgtctcttcttcttgtgttttccacactaaaactcagaacttccctagaaattgactaactccttttattttcttcttaaactgataattcttactgctacacatttatcctgattttcatgacctattcaaaaataacatatagtaaataattgagaaattatcacatttaaatatagtgttttctatgtccaaaaactctggcaatgctcttacacagtgtaaacactgaatagttgtctccccacatatgccccactcatggcttgccactttgatttcttctttatgcacactacttcatgcctatttcagaaattatgatttcctgtcactgcagatattatttttaaaaaactttaggagtcacatcaatgcgccttaaaaaaatcattctccacttcacaattggatgaattatcctctttctcctatcaagagcaagtctgccacttgttcaaaacttaaattttgtactgtaaactttaaaatagtgctttcaagtgcataataacacacaatttgaaatatattcttaggcataatgtctgcaatgatcatcaagtaatagaaaaaaaatcgtgaagtaaatcagtagctaccaattccattctccagaagagaagtgtaatgcgtatttttgtgaatctgacatattccaacctttgtgttcactgcacttccctttaatccatctaccttgttgatgtctcaaagctgctttttgtgtattgtggcttctctggtcagagttggttgactaaggaaaatggatctgatctcagtgggatcactctggttccctcattaagaactacagaaactgagacagaaataaagatcttggaggagctaaaatacaggagcataaggtgagaaataaaaggtcataaatggtaactgaaaaatgcaaagatgctatccatatagagaaaacagtaacaatttgagacctttgacagaaaaaaattacctgtctggatgggacagggaagaattacatagatttgggggcggggattaccacaatttttgagagtcttaagcttctcaactccatgatgtaatttcttcctagaatggtctgaattcttgtccttgagcttcatggaaaaatagtataagttacaatgatttttcccttttccttgagctaagcctaattggtttctatatttgcaaccaacatgaaaaataagactcaaagtgattaaacttatccaagatcacattttctgatagtgaaaactgaaaaattaaaaccatagcccaggtcccctaacttatattatgatggattatggcatcccaggaatgtctgatcagatacaggcagtgaggacccagaggtttatgtaccaaaattggaaaagagaagatatctctctagttaaatagccaagatgactccaataggtttaatgataaacactcagcagtatagcctcacagaagtatgggatttgggggggggttgttattttttgcaaaggagttttgaaatgtaattggtacctcaattaagctcaattaagatgagtcttacatccaatggcaagaatttttacaagaaggggacatgaggaaaacatgctgagaagtccacatgaaaagaagatcaatatatctacaaaccaacctgcagccacgactgccagcagcagacagctaactatctagattttggaattatggccaccagaacagtggaagaatccatttctgctgctcaaaatcatcaatttgtgctgatggattataacattcataggaaactaatactatattaaaatataagttattatgaagggaatgaaaatatcagagaaagataacagtacttggggttgctactatacacataggaaaaactaagcattaagaaatcatgtaggccgggcgttggtggcgcccgcctttaatcccagcactcgggaggcagaggcaggcaaatctctgtgagttcgaggccagcctggtctccacagcgagtgccaggataagctccaaagctacacagagaaaccctgtctcgaaaaaaaaaaaaaaaaaaaaaaaaaaaaaaaaaaaaaaaaaaagaagaagtcatgtagtatttacttagcatcaactgaagttcaagagagacgtaccaactgaggaggcagaaaccagggccaggtattggccctaagaagccaatggttttaaatcaggactggctgagctgtttctaacccaggtgctgaaaagtaattcatattcttcagaatactattctgaatcatttgctgaagatttaccaggaatttgtttctttttcctgtcatggcttcgtcaggaaagatacaaaacatcttctccgccattccgtcatcagcctgaacagtatccttcatgtacctccacaggtctgttataaaggaagcagcgtggactctttctcaggaacatctttgcttaaagcagggaggcccaaagtgacttctgcaaatgttgctattttatgaaaacctctaatggaaagttcggagacacaggattcaaggagacaagtgggtgacacagctctaggctctttaatctcctgacaaagaaccaggagaggataaagcagattgataggaaccctcatcacagaggttcccaacctcacagtacttcataaacaaaataagcttaaaaatatatgaatacccatgtagaaaaaaaattgtggaaaaaaggaccagtttagactgtgctggaattagaatctgtgaaagcatcctttatttatagttggataagtagaccatgagaacatgagctttttctacttactttttttccactacaaaagaacctgtaccattttcagactaactaaattaacagttagttggttccattgctatttcaatgaaaattcagttttctgtatgtatagcttatgaataaggtgaacaatatatcttcattgttatttgatgtcaacatcttgagatgagtgagtaatacaagtatttgaagaaagaatgccccagaggaacacataataaaaagccaaggaaaagcctgtgaagatctcaggatgctattgctcctccttaccaaaaagaagcagagcatctatacattcaaatgtcctggtcccttactgttttgtgcttttaactggccatactataaaagttctccaaactcaaggacatatgttcaacaatgttcatagcagcattgtttgtaatagccagaatagcctggaagcaaccttaatgcccctcaacagaagaatggatagagaaaatgctgtacatttacacaatggagtactactcagcagaaaaaaaaagcaagggaatcttgaaatttacagacaaaccgatggaactagaagaaaccatcatgagtgaggtaacccagtcacaaataagacaaacatggtatgtactcactcatatgtggattttatacatagagcaaaggattactagcctacaatccacaccaccagaggaactaggagacaaggaggaccccaagagaagaatgcatggtcccccggagaaggggtaagagacaggatatcctgagctaattgggagtgtggggtaggggagagggatctgggaaaagagaggtggagaaatagaggggagaagggaaatgggggaggaggaaggttgagtcaggggaagaatagaggagaattatgatgaaagatatcataatagagggagccattataggttgaggagagatctgacactcgggagatttccagaggtctacaaggttgacaatctaagcaatagtggagaggctaccttaaatgctcttcccgaataatgaaattggtgactaccttatataccatcctagagctttcatccagtggctgatagaagcagaggcagacacccacagctaaacactgaactgaactctgaaacccagttgcagagagggaggagtgatgagcaaagaggtcaagactggtctggtgaaacccacagaaacagctgacctgaacaagggggagctcatggatccaagactgatagctgggataccagcatgggactgatccagacccctgaacatggatgtcagtgaggaggcctctgcactctctggagcctctggtagtagatcagtatttatccctggtgtatgaatggattttgggggcccatcccacaaggaggaatgttctctcagactggacacatgagggagggcctaggctctgcccagattatattacagactttggggatccccatgaagggccttaccctacctgtggagcaaaggggagatggggagggggctggtgggggagcagaggaggggagggagagggagctgggattgacatgtgaagtaggcttgtttctaatttgaactaataaattttaaaataattttttttaaaaaagttctccaaactctactcatcaaaggtctccacagaacaagcacagaagtggaacaacctcaggtcgttcccaagagctaggcatgaaacagttcatttctgtcaagaacttatctgcccacattttcatggggtgcataagcccagtaccccaaaagaaaccaataggggagagatatctgatcctttgatgagtgagaaatcgattaaagaaattaatttgatttagagaaatataacttcttctgttcctatagatgagcaaatcatttcaaaatttagtattatttgtggagaaccaatgttttaaatgttttaaagggatcttatgataccaaagatatcagaataatttcagaaaagttgaataatatctaataaagacatatcttcaatcttttgtagtcatttttcattgtctgtaataggaaataaaacaagtacaattcagaatgattcatccatagcttcaaaatagtgatctattattcatatataaattctttgttcatgtttagatcttctaaaagaacacttagaataagccctttaaaactccaccagtgttaaagccattgtgatagaatgagcagtctcctttgtaactatgaccactcctaacttctcccagacattctctccacaccagcagctcaccagagtagctcttgtctctgtatgctacaagagcaagccctgggcattctctaattatgtgctcagttattctgggccttgagatgaataaaagttgggtgtctttctggtgtccttctggttgctatattgtatattaaaatggtagcacctcccttttctgttgtcttctcattgttcaatcaagactatttttcaagacagggtttctctgtgtaacagctctggctgtcctggaactcactttgtagactaggctggcctcaaactcgcaaggctacacctgcctttgcctctcaagtgtagggattaaaagtgtgtgccaccatgcccagccaagcaagactatttttaaggtctaggaaatatgtggacttcagtgcacctaactcctcaatccttcacacccaattaccacccaagtctttgatcaagattatcaatatatttattccataaactagcacttctcaaacacatgaagttactaatgatatgatactgaaaagtttctgctgcccagcctactaaaaatatttattgggcatttactgatcagttattaagtaaattgactgtgcataattgtcataggcaatgaacaacctagattgtgccagtgctattgttatattatatatagataattaatatttaacaaatgagtttataatatttctggtgataaaatacgttaaaaattaacagcactaacgtgggagctaatttttacaggataactagtgggtgatttgaagcagaaagttgaaagaactcaagaggcagcgatgcaacctgctagggtaaagtccatttcagaagaaatgaaaaattatttcaaaatcctgaaggcagaaccatgctaagtaggttgtaggaactgaattgaactccttgtagatggaactgagtcatcaggaagaatggcaacgtataggacctggatagttgttcgcaaacacagcatgttagaatcatgtggggagctttttgctggctttcttttaaaccaatgacccaaagaagcaggtcagacaatgtaatctgaaaaggctgtgcaagacacagtgccccatagttatccctacctgagaaagataaagagatccctcatatgaattcaatgataagagatttcataccagaaatgagccatgctcaattcccccaaaaataaaagaggatttgggggtttgggcagttggaagtcaagttccattgtgagtgaaggtctgagccaatggcttgcacttagggtgagtatacatgaaacttttgaaaccgtgcctggcatagagtaagtgttgcagaaatggaaggaactgctaataaaatagtcttctgtatgcaggaattctgcattaccgattcaaccagcccaatagagcagatactggaacgcaactgcagaaactttggaaaagcagaatttgaacttgttgaatgagcactacagaaagcagcgtgtaagtagaatttgaacttgttgagtgagcactacagaaagcagcatgaaagcaggcctctgtatactcttgctgcttcacagatacttaacctttctctagcactctttgagaactgtttgcttgagtcctgtgcaagtttagtattacaaagcattaattagatggtatgcatgtagtaaatatgaacaaatatttttatcattactccttaagcaatacatgataagaattatttatatatcatctattttttattcagtattatcctcatgggatgaatttaataccttggaagattcatatggcttatatgaaaaataaaagggatgagcatctaaagatgtcggcatttataggaagtgatggaaccaatcttctattgatcccaaggcgcaagtacagcatggggactgagatctagggatttaggttcaggtcgagttagatcaaatggacttgggaatgactatactcacgtttaatttagatagtgaaaatactcacccttaaaaacgcatgtaaaattctggcaaaacagtacaaagcctagaaaactgaatgaagaacttggatcaccaaaatcctgagaagttaaagaaaatttgtgaagaaaaatagcagtgcaaatgtagaggggaaaaataagtagacttgaagttttcagaagttcatgacagccagaaagcagcagagctgcagtaagtactgtatggtggttgtaactttataaacccagactctctctgttgctcacaacttcaaaagatgagatttaagtgccttctcttgactatagcctgtatttagtggcttgtttttaatgaaatacaatctataaaagtgatggtgtatggtttaacaatatggttcagtgtgtaaagacacttccagacaagactattgtcattagttttatcacacgatagaaggaaagagtggactcctaccagttgtcctctgactccacatgccaaaggacacacatgctatggcatgagggtgcacatgcacacacacacacacacacacacacacacacacaatatgtatatacatattagtctgtgattactctaattgtatagcagtttgttatgctgtctagcctgtgagtctgtttaattttggagtgtggttttttttatttgtaagtttttataataaagtttaaaataaataaataaaaatcaataattaagccaagcggtggcggtgcatgcctttaatcccagcactcaggaagcagaggcaggcagatctctgtgagttcagggccagcctggcctacagagtgagttctagtacagccagggctgttacacaaagaaccctgtctcaaaaaaacaaaacagaacaaaaaaaaacaaataaacacaatacaataattaaaagatgagggcatgtagctagcaagcttggtccataaaagagccattcttattgctctttcttacacctctacctcttagagagcccattttcagatcaagagcatactaagtagccctattaagaggtttctttccagtggccagatcaaactcactatcatatgaatggaccactttgtacaaagaccctcccattctagccaatctttgcaaggaccattgctgagagagaaaatctgtcttgcccaaggacactcaattgcttatcccatataaagtggtcagccatgaaaccatatatacataatcagcaccaagcagacccagcaggctgtatttatataatatatatatatattatatatatatatatatatatatatatatatcaaaagcaaaagaggccatcaatttaagaagtgatgggtgacatgatagaggttagggggagagaacaaaggggaaatttagagggtggaaatggaaagggggaagtgatgtaattgtattttaactaaaaaattagttaagacaatgttatgagccagaatcacccataaaactattctcaactgatttgacttaaggcccagtccaccagatggaacccatacctctcactgcttggttgaccaagatccagggaccagatatcccagacacctaggataaaatcaaatattagtctcaaaaaatagtaataaaatgactagtaatgatattatactatgcatagattggtaccttaatcagtcattatcaaagaagcttcctactgcaacagatgagaacagagtcagagacctaccgtcaaacatgagagacggggaacagctctaaatggggtgtctccatcaaatctcttcccacaatgttcagggaaaaggaggaaaacagagtgtaagaggcagagagaacagaggacaccaggagaacaagtccctctaagtttcacgtgtaagaattagataataaatacatcatattcaagttttgctatttgaccgtattcacattttaaataggaaagaaaaattcaccgacttcttaactacttttatggggtttaatgcactcattaccctgtatactgttccaaggttgagtacaaacccacttaggaacaggatggagatgaaacactaccagagatctttcccttcacccacttcctgagccttgactaacagacatcttatcctgcagcaagtcatgttccaagctcaggcggcagaaagcttattttttatagcaatccccaaagcatggaaaaacaaacagatttcttggtgtgttaatgcacaaaagctgtgctaagaggcagtcactcttggcagcataaaaggtctgattgtctatagatgtttgaccctgaggccatgtcatctagcttcccttttgttgttttgttttatctctacgaaaatttattgaattttcctttcaagctacaaaatcagaacctacttattgtaacaataaaaaaaaacattgccagcaaataatgaaaaaaaaaacagcagtgtccctttttccttcattccccaggtaatcagtgataagtttgttcttcaacctgctatcttttctctatgaattggccacatttgttttttaacctagactatccaacatgaattactttggaatatgtatcattttcacttaagacatattacagttgtcactttagattaataaaaacagataaaattcattgttttatacagttgtgtgaaattatatagtgtggatagataataaccattcccttgctatttccagaatttatgatcacacacatagctcagggtcaggaggaatatttccttagcaataaatcatttgattatcatgcacagggctctgggtttgatctcacacacaagctagaaagtgatagatgatagaaagacagatgatagatagatggatagatgatagataggtagatagatagacagatagatgaggcaatgggtaattttttaaatttataattatattttgtataaatcgaaaacatctttagcctttcacggttataccatcagaaaacaatacaaatacacaatataaatttatcaaaacttttacagtatgcaacacaaaatggaatactagtaagggttcccatttctccacatcctcagtgtggttgaagaattctaaacttccagagtctacagtgaagatagcatttcaaaacagctttagtatatatgtccctattagccacgttgagcattattcatatactttagaaaactggttgttctttgtttttcacaaaagtttgctgaaggagacaactaagcagtgtggacattttaatttgttttgaattgtttatttttagttgaattaataaatcctgttagttagagtagcttttgtttaacagcaaagttgaggtgaaagttcaaatttgccacatatcccatccctcgccagcaagtggcctcctctttgtcaacccaacccaaccgtcatccatgtggcacactttttacaatctgtgagccagcactgatacatgaatatcatcattctaccagtctgtccgccgtgctctgctttgcgttgtttatgttttgccagttttacaatgcacatctatcacagcatcatacaaaattattccactgtcctcaaaaatcatcgctgttccacctatttatccttctatctacctctctcctctgtaaccatgatgggtatttttgacatatatctgatccttccacatggcctttgaagagtgactgagatcctttctgaaagaggaagatggatgtggtagagatggctaccaatggccgcagtggaactctgggctgatagtctctgaccgaaacaaggtgaacgacacattccatgctgccgtatgtcaaaatctgatttttttcatggagagagagagagagagagagagagagagagacagagacagagacagagacagagacagagagacagagagagagagaggtttgaacctcttcatttatcctatatagagaggtgctcccactatgaattctgatatgcagagaaaatgcaaatcctttattttgcccataatgattctgcatgttaaagaaacttcctactcattggttaagatgtatgaatgcactacatggcttagtctccatcctatgcaccaataatttgaagagttcctttgggtagcaggctctaatttgtggaaaaatgcttagtttctcagggtaatactcacccatctctgttctcaagatgttacattgggtggcagcaatatatcagggatgataggaagaaaatcctgcctccatgtgtactcactggcccccaagtaagctaagctgtgtgcccagaaatcctcaggtatctgcctgtctctgcctccttagaactgggatcataggcatacaccactactcatgaaattttcacatgggtagtgggagtctaactcaggtccttgcatggcaaacgctttgctgcactatctccctagtcctgatggtagcatctttgtcacagtcaataccattggttgctgctgcattcacagagaactctgttcctgaaatttctctgttatacagacaagctgaaagagtcacaattcagaatcatctgtgtgttctaagatggacatctctgagtgaccactgtggagctggccatacctagaatggttttagaaatggcacactagtgaagaagtcaaaggcattattggctcacatagaagtccatgcccagtcatcagcaggaaagcacaaagcactttcatctttcatgagcgcttatgaatgccatgcagagctcttccataaaatgacctaacagattagctctctgtgacctgatgacaggggcctctctaaacctggaacatgatagctaaccaggatttcctgtggaatatggttaacaaagagcagcgaggcttcttactgctataactgccctagctcctaggtctgatatgtcaactgccacaactccagtttcctttcaccagagaggtagaaaacagtattgatcacttcctcccatacttaaatgtcaagctactattcattaaatgacagctagtccagagattcagctcttatcacagcatctgacaagttcagagaagaaagaaaagaagggaagaaaaaagtgagtttggaattaagtattcagggactacagtgagacacctttgtatttggtggtttctcatcatgttaaaaaagaaaaaagtaaagaaaaaactctactacaattaaaagagaacattttttaaaaatctagtattcatgtctcatgtgagatggctaaaatgccaaagctttaaggactattccaagagtactgtgatggggcaaaagtgcccaaaatgtgtttaaatcatgaggttctaagcattgttaaatgaggtaataatgagcaatatagaatatgtagagtgtgactggtttatgtgactctaaacaaaatcatccaatagtggcactcttatttgcatttctattgctactaaaacaccatgaccaagagcagcgaggagaaagggggtttatttcagtttatagacccatatcttacttcagggagtcagagaaggaactcaaggcagaaactaaagcagaagccatggaggagtgctgcttactgacttgctcagccttctttctttcacctgcacaggggtggcactgcccatgatttcctgagcccttccatattcatcactaattgagaatatgcagaccctagtttcgatttctgaaaccaatgaggctaacttgtagagcctgaagaagccaggcacatagtaaagtgctatcatgagggagggaagacaccttacaaaaggtgaggacgtggtggaacattagtggagtgcaagttcacggagggatactgtatgtggagagggttatgcagggctgggagtcagggaacagagaacaggagggagtagaaggaaatgttaacaaaaactaagcatgtatgaaaaagacccgtgaaacctactattttagaagtctatcaaaatatcatttttaagttgtgggtctagagactccctgcatgggtaaataatgattcccctagaagccataggctactgaatgaaaatccaagtgacaaatatggaacaccttcctataagttagtcagagaggcccaatgccccaaaataatgtagattattgccatttctctttgctgactaccaggacgagatgataagactctattgctaaatacatcatatacttggttgtagaatatcaagaaaccaaacagtagctgagctgaaagtttcctccttgatgtctaccctttcgtagcactagatggtactatacctgctgttgggagagaaaagttatcaatggtcctagatttgggagtaactaacctaaaccaatcattctgattggatttgaagcctactccacaaaagtaggaattttgcctggtactataaatatggtcaagagtccatgactagtgttgtggtttaaataggaatggcacccatagactcatatatttgaatgcttagtagggagtggcactatttgaaaaggattaggaagtgtggccttgttggaggtagtgtgtcactaggggtgagctttgaggtttcagaagttcaagacaggcctagtggctctctatcttcctgatgactgtggatccatatgtagaacattcagctatttatccagcaccatgattgcctgcatgctttcatagtcccctccatgatgacaatggactaaacctctgaacctgtaagcaatcccccaaagaaatgctttcctttgtaaccgttgtcatggtcatggtgtctcttcacagcaatagaacactgactaagacagctagggaagtcataagtctaaagtagcatgctgtcaaactgttttctaaatgcttatatttggacttattgtttcagctctcaaacttcatggcaccttttttcccataggtgccagttaatgtagagacttacagatggtcaaaaagctgaggataagttactgttgaattctcaaacctaaactgtaggagtatgctaacagctggctcagggatagtccagcatacacattagtaacttccctatgagccaaccagaagtctgccttgaggtcttaagatagctgatgtcatgatgacataggccaatgagagagacaacacagcattccagactggcactgtccctgggtactgggagagggtataagagatctgtccatacccttaataaaggagttggcttttgcttttcatctggctcccggagtctgcaccattgattctgccccttctcctcgccttccccaagaggctaccttcttggactcattctccccaacactaaacagaacatttatatcacttcactaactccatgccacacaccaagctcaggaaaaatcacaggagagtgtgtgggaaggatggaagagccagaagatgtgaggggaatcctttaagatcatcttctggtgtgaagggattattgcattcacgaactcattgtagttgtggctatctacagaagaaactcacaaaactggaccttgcaacatttcatcgtagatgacagaccagttcacaaagccccactctctccacaaaattatgggcagttaatgggtactaaggaagagaagtcattttcttcagtggtgtagccacatgccaattttgcccatgctctagcaaacaattccctacccgtgttcacatgtgaagccataattaaaaccagtgcgtcacacacacacacaaagacatcaaagcaaggtgggcaagcttgctgtgaagaagagggtttaagcaggacaaggaggccaataagaaagggtaatgagtaataagaagtcaaaatttattatacacatatatgaaattctcaaaagaattttaaaacttcagaaatgcctaggttttaaagtacatattctaagggtccactttcccatggagactttttgaggatcaggtcttcactgcactgtctgatgcatctgcagcagcttttctgggaacactctcttcgcctgtcaaatgagccagaatagagcatccttcttccagggaacatcaggactgttgctccctgcatccccagagccattccaggaacagaagtttctgtgaaactcagtgctttcagagcgtcctctccttcttagttagagcttccattgctgtgaagagacaccatgaccacagccacccttaccaccatatcctggtgctcctttggccctcaaaatgtacattttgtcatttaccctgctcagcttgttccttttcattataaattttcattagagttaacactagtaaccacaaaacagagtctgtaccaggctgtttcaagatttcctctaccatcagaattaatccaaaactcttcactttagccccaggcacactctttgggcaaggtcaaaaagcagccacttcaccaaaatatcacaagaataatctctaggcaacataataagatccttctctgaaaacacttggatgagcccctgacagttcaaataactcttagcaccactgcctgtcatggtccaactagtatggttccttaagcagtgcttagagtattccaccatttaccaaactccgagtaatcaaattccaaattcctccaaatagaaatatggtcgggcttatcacagaaacaccccagtccctggtgccaacttctgtcttagttaggtcatccatttctgtaaagagacaccatgaccacagcaactcttataaagaaaacactaagttgaggggattcacttacagtttcagaagtgcagcccattacaatcttggcagggagtatggtggcatgcagacaaacttggtgctgtaagagtagctgatagtactacatcttgcaggcaacagggtaaggcctcccatgggaaacaacaaagcatggcacatcaagctgaggcaggaccaagctcttcccccgcctgcatcaaggctgagcagggcatcctaccatagggagtaggttccaaagagccagctcatacaacagggacaggttctgattccactgcagggagtccccacaaaagaccaagctacacaattgtcatccacatgcagagggcctaggtcagttccatgctggctccctggctgtctgaaatcttaagaaagagaactacagaccaatattcctcatgaacattgatgcaaaaatactcgataaaataatggcaaattgaatccaagaacacatcagagaaatcatccaccatgatcaactaggcttcatcccagggacacaaggatggctcaacatacaaaattccatcaatgtaatccaccatataaacagattgagaaaaaagaaccaaatgatcatctcactagatgctgaaaaagcctttgacaaaatccaacaccctttcatgataaaggtcttggagaaatcagggataaaaggaacataccttaacataataaaagcaatatacagccaacatcaaattaaatggagagacattcaacacaattcctctaaaatcagggacaagacaaggctgtccactctctccatacctcttcaatattgtccttgatgttctagctagatcaattagacaacaaaaggagatcaagtggatacaaatcagaaaggaagaagtcaaactttcactatttgcagatgatatgatagtctacacaagtgacccaaaaaactctaccaggaaactcctacagctgataaacaccttcagcaaagtggctggatacaagattaactcaaaaagaaactgtagccctaccataaacagatgatacatttgtggagaaagaaatcagagaaacttcaccttttacaattgccacaaacaacataaaataccttgggctaatgctaaccaaaaaagtgaaagacctgtactgtaagaattttgagtctctaaagaaagaaattaaagaagatactagaaaatggaaggatctcccatgttcttggataggtaggatcaacatactaaaaatggcaatcttgccaaaagcaatcacagattcagtgcaatccccatcaaaatcccaacacaatttttcacagaccttgaaataacaattctcagctttatatggaaaaacaaaagacccaggatagccaaaacaaccatgtacaataaaggaacttctagaggcaccactacccctgacttcaagctctattacagagctgtagtcctgaaaatagcttggtattgtcacaaaaaacagacaggtagaccaatggaatagagttgaaaaccctgatattaacccacacacctatgaacacctgatttttgacaaagaagctaaatttatatgatggaataaagaaatcatcttcaacaaatggtgttggcataactggatgctagcatgtagaagactgcagatagatcaatgtctatcgccatgcatgaaacttaagtcaaaatggatcaaagacctcaacataaatccagctacactgaacctattagaagataaagtgggaaataccattgaattaattggtacaggagactgcttcctgaacattacaccagtagcacagacattgagatcaacaattgataaataggacctcctgaaatagagaagcttctataagtcaaaggacacagtcagcaagacaaaacagcagaccaccgactgggaaaagatattcaccaaccccacatctgacagaggactgatttccaaaatttataaagaactcaagaaactagtctccaaaacaccaaacaatccaattaaaaagtggggtacagaactaaataaacaattttcaatagaagaaactaaaatgtctgaaagacacataagaaattgtttaacatccttagccatcagggaaatgcaaatcaaaacaactctgaaataccatctcactcctgtcagaatggctaaaatcaaaaacaccaatgacagtttatgctggagaggatgtggagaaaggggaacactcctccactgctggtgggagtgccaactcatacagccactttggaaatcagtatggcaacttctcaagaaaatgggaatcagtctatcacaaaatccagcaattccactcttaggcatatacccaaaagaagcacattcatacagcaaagacatctgttaaacaatgttcatagcagtactatttgtaatagccagaatctggaagcatcctagatgctcctcaattgaagaatggatagagaaaatgtggtacatttacacaatggagtactactcagcagaaaaaaaaacaatggaatcttgaaatttacaggaaaatggatggaactagaagaaaccattctgagcgaggtaacccagtcaccaaaaaataaaccatgatatgcactcactcatatgtggattttagacataaagtaaaggattaccagcctacaatccacactaccagagaagctagtaaacaaggaggaccctaagagagacacacatggtcccctggagaaggggaaagggacaagatctcctgagcaaattgggagcatggggggaggctgggagctatgagaatgagaaggggagaagaggagacatgagcagaacattagggagcaggaattttgaattgggggaagaatagaggagagcaagataagagatacagggagccattgtaagtttaaagagaaatcaggcgctagggaaacgcctggagatctacaaagatgacaccaaataacgatctaagctacagaggagagtccaccttaaatgtcctcccctgataatgagattcataactaacttatatgccatcctatagccctcacccagtagctggtggaagtagaagctgacacccacagctaaacactgaactgaaatggaatccagttgcagggaaggagaagtgatgagcaaaggggtcaagaccaggctggtgaaatccacagaaacagctgaactgaacaaggagaaacccttggttcccagtctgatagctggaaaatcagcatgggactgatccagaccctatgaacgtgggtgtcagtgaggagacctctgaaatgtatggggccttttataatagatcagtacttatctctagtataggaatagacttttgtagcccattccacatagagggatactccctgagcctagacacaagggggtgggcctaggccctatcccaaagggcataacagactctgaagacctcaccctccctggagagcagaaagggtatgggatagatagggtgttagttggaggggagcaggggagaagggaaggcagaaggaactgggatggacatgtaaaataatcttgtttctaatttaaataaaaaatggagagaaaaaaagaaaaattataagatactcaggtaattttttattaacactttaaattttaaacctaaaacacagaactcacaaaacctagcaaaacaccaaaaatctgagtcatcttattctaatgaaaacaaatgctttcagtaacaaccacccccctgccccccatacattcactttctatggttacactaaccacaatcaaaacagcagatgagaagtcccaacaagcgacaatacacatgtactgaactgaagaccattcttagtgctgtaaccctcactctcccacccaatggcatgcatcctgtatgcagcatgtctacactgcatatctatcccctcagtggtcacctagtagccatcagatgaactgctgggatattttggtgtatttcttatcttacttgataatggctccaaagcaagagcattaatgacactgggaatgcagatatacccctgaaaaaaatctggaaggtactctcttctaactgaaatggtaaaacagtacacaatattttgatagaaagactacactcacatgctactttatagtatattataatgtactattttaaaatcagatattcttggtaatctcctactgtgcctcatttatatgttaaacattgaagtgagtattatatgtatggaggaaaagggcagacttgggaagtgtcctatttatgttttcccatgccccacccactccagcctttaatgtacatcatatggatacctattatatgttaaaacctttctacaaaggaaatatctgaccagataatcaatattaaaacactaatcttatctttaaaacttcttcagagaataaaaacaaaggaccttttcccaatttatttcttcagagcatcacctaccagaagctactgacaaggaccgcagcactatggaagctgggtaatgtatcacaattatgttgcgtttattccaggaatataaaaattgaggttaacactttaaaatcaatcagcttaattcaccacaattacagaaatgaaaggagaactgtctcatcatctcagcacatacagaaatccagcctccattcataatgatgaaacacatatcatcccaaacccagaagaaaactccgcaatgcattgtagagcatagatttattttgaggtatcattttgcatgtgcaaaatttattttggcttattccctaattctctgctccttggggtaataaagagctgattaatggagagcttaataactgtacacaaaagccctctgtagggggggcagtcatttcagagactcaacaaggcatttaaaaattaactgaatgtaacaggcaacttgaaacacaagtaacacaaaagaggctccagaaataaaaggacaagatgctgataatgatgcaattcaaatgccagtcacatttgtttctaggtacctggacaaggcttggtgacattaaaatgcttcactctagagttcagaggtagactctattgtactgattttaaaaataccagggctggagatttatcttagatacccacaagacacaaaattgtagatagttaattacttccacaaagagctgcctttatacaaggaaaaaaggaactaattttgaggaggaaggggaccagtgggagggaaaaggggggataaggaaagatgacgggggtggagtggctatgagaaaaggcaatgatatacatatgtgatgttataatgaagcctgttattgtgtatgctatcagaaaacttttcaattaaaaaaagcaatgtgcgttcgtgcgggcgtgtgtgcgggcgtgcgtgcggacgtgcgggcaggcaggcaggcgggcgtgcgtgtgcgtgtgcgtgtgcgtgtgtttttacagaactcatttccataggtcccaacttttccccaggacaggctggaatgggccaccacaagccacacttactattcatgttctttaccagacgtcaacatgggcttagagcccagaatgtcctaaggaaggcttctaaaacaaatgccaacaagcaccagtgtggataaaacttcagcagtttggaaactgatggaggatgtccttctgtatacatgtttcccttattggttgatgaataaaacactgtttggccaatgaggcaggaagataggcaggacaaggagaaaggaaacatgcaacccatgttgatggtgccattttgttactgtattttctcagacccaaatgaacacacggacactatattaattataaaactgttggtcaatgtctacagcttcttattggctagctctgtcttaatcattaacccatttctattagtctatgtatttccatgtggtcttatcttaccagagaatgcctggcacatcctttcctcccagtctctccatggtgtctgtttccagcccttctctatctacctttcccagaattttccttgtctcctggccctgcctatctgcttgcctctactggctataggccaaacagtgttttattcatcaaccaataagagaaacatatatacagaaggacatccccaatcaggaaaccagtgatgcacaaactgcattccccagttctggacctaatgtggtcaattccatgtccttgcactaggaccagaggagaggagaggagcctgcagatgagtaagaagtcaggtacagctcaacagcaaatcaaatttctgtagaggtttctccagctgtagaaccaacttcacctagtaatcagtgtattctctagggaacaaacctttccctgagtgtgtttaaaaaagagaaaggcagaaaaaatatttacccaacaaaatgtcaggaaaggaaaacacagatagaatcattttattaacagttttttcccaccctttatcacacattctccaaggtagcccactacctctgcaaactgcaagaccagaaaccctgcaggcatacatggcatggcaacccggaaaggtgcaaagggtcttagcagtgagtgggaacatctatcattaacctcagatcttgcagcgtctacatacatggggtgagacattcaggggcttatagcgtatcaataatttgtgaacagtttttcacttttgttctcaggtgccaagagtttgaggttctcaaatgtaggaagggatgacctttggctgacaaatcaatggtagttaattattaaaaggaaccattattgctgcatgccaaccttcaggggcctacattccagtaatgagaagatccagaatgatttgaaagcattcttatcagaaaacagccaggatatagagggatatagctgataaggcactgcatcccatttgagggcctttgtttcttactcaaagggtgggtcttgacttctctcttgtcactgccatgctctcttaaatcaaaaggggggaaaccctgagctcttgccttgcggataacgaaggaatactgagggctgacattcatacctctttcatcttgcttagaccagtctttccccagcatggttctccatcccctccccttctctggctctccactctctcattctttcttcctagtgcttgttgactgctcactaggtaccccagaaccactgggcacagaggtggatataaagaaatgcatagcctgacctctacttcagaagcttataatttgtctgcattgtcagttaatgaccaattcttccatggccttcaatccatcctcatcagtgtccttatagccttatagcttttcttttccaaagaaccataacatcctgtccaaagcctcctttcccctgactcactgtagtatcgtccagtatatattattgcttctctgcatgttaaatgtccactggatgcagactgtggaaatggaaattggtcctttctaaacaacgccattcatcccaaaagagactctaagagccttctctccactagctggacctgacacttcagctgctcgttggcaaacacagcccattgtataacccacagggcttcccagactcttttgtgttccaatccaaatttactcaagacccactgatttcaaagagatctgtgaggccttcgagctcagaagccagagccccatagtttacccctcctttcctagtccagtcttctctgggaaagtgtcatttactgcagtccccaaactaggaactgaggataaacaacatgacaaatcatttctgcttcacagggtgcaatgtgaagtcgctggaactgctgatgtttcataaaagaagctgtgcggtcgaaattatgtccaggaaaatggactcggttcgctgttgcctctggaaatattcccgacaatcttcactttaatagtttaaatttaatcaacttgccttctgttctcaaagttaaaatctcagtattaataaaccaataaaggcctatcagaaccagcacccgagcatatggtaagtgctcaaaacttaaataaatagatatttcttacatgctgcaacattctgcttctttactaataaatatttcaacatctaaatataatggcacaaagaaatttcctcctcctcctcctcctcctcctcctcctcctcctcctcctcctcctcttcctcctcctccttcttcttcctgcattgaagttccttccactatcatatgaatctgtaatttgagtgtaaattatcacattaggttcttaggaaaaatctttaatactctcaaaatataaccataagaacaacaatccaattagaaaacatgaaatagttctattctatggagttttgctaggcaagaaaaggggatgaacttttaatacataaaacaattagaatgggtttgcctttattagctttattactcattatctagcttttgaagatgaaaagagggatcactaattttgcctcatctagtctcatatagaaagtcaatgtagtgtagtttccataagcccttcttcagcaacacaaaaaaagtttgatatgctttatttttattcagtttaaactcaattttccttgagatttttcctttgacacacgagttacttagaagtataatatttggttttcaaacactaggatattttctacatagctttctcttactgattcataacttaattctgttgttataagagaatttactttgtgacattttaatcattgtaaaaatagtttgtcttaaacattagaaaacatcctatctcagcaaatctccatgaacatttaaaggaatgtttgatgtttattctgctactttaaaatgagatggtttataagtaaaaggaaagttaagtaaaaaaataaactatcttttttcttattctttaacattttcttgttctttatctataacaatttgtgactattgttccattggttattgagctagaataatttaaatgtggatttgcctctcttctcagttgtatgagtttgcgttgattttgaaagtccaatattttgtacctatagatgtgttgttttctgaatgaattgaagttcatcctttttgtttgttttaaggttatatagtcagtaacatttttgtttaaagaaagtcaacataattaaaacatgaaaaaaaaacaaagtcaaagaactgacttcctgttttaaaagattttctacaaatcaaagactacagtcattgggaatgcactagatgggatctggagagatagcccaggggctcttcctgaagacccaggttcagttcccagcacccacatctggtgacattacaacctttgccacaccagctccagaggatcccatgccctcttccagcctcctcaggcacctgcactcatgtggaatccatgcacacaaatgcacatgaatagcaagtatggaagtaaaataaactaaaaggctttattatgagagtaaagtgtagatcaatggcagcatggagacaaagccttttatgaactgatttccaaagggcttccatgactattcagtgaggggagattagttggtttaacatttagtctagggatgactcaatgtcctcatgatgtcagctagatcaaccattacctagatacaacacttaagacaaatgcaaccaaagaagaaataaatagaactttctggaataaataaacttttatgcctcataagtcactatagaaaaagggaaaagaccaatccatcagggaaaaaatggttgtgagtcactagtgtatctaaggtccagaaaaaaactatgacaagttcacagtaaaaaggcaaatatccaatataaatttttaaagtacaattttcacattaaaatgccttgcccttgttgctcggaaatgctttattgtatttccatagatttacttctgtagcccccattctactgcagtgatttatatgaatgctaatatctcagacttatagtctgggtgtgtgtagatttatggtaagcctggatatcctacattttttctattcaaaagtcatggttgtcccaggtatttcaatgtacattttaatttggattttcaatatgtatttttaaaagcttgtgcaatttcaattgagaccaagtttatacagtaacctagatgaaagacatatttttttcataacagtatttttaacatttatttgttttgtgtgagtgcatacatggggctggaggcaaacttgaagaagtgggttttctcctcccaccatatgaatcccaggagttgaactcaggcagccaggattaacaccatacgtctttatccactgagcttgtctcactagctcccacagactgatttctgaataagtcttttaaccacacacagggtgtacatactcatttcttcatgtcccctttcgtttgtcttggcaacattttaaaatatattcagaggcattcaaatatttgtaaaattaccattataattaccacgagatttaataatgtgttaagttgtcttaatttcaggcaatctagaaatataattgattatatttatcggccttgtattctataaacttttggaatttatgtattaatcctagtacattttctacccatttttggttttcttatgtacacaaccatccttatatgagaactacttatgcttattgttataattctgattccttgaatttatatatgttgccttatggcattggttaagagcaggataatgttaaatataggtgctaagaaaggggggcacctttgtcgtactcttattctggaagagaaagctttctattttggttgttgtttattttattgtttatttattttttattagaaagaaaattattttacatgtcaatcccaggtccctctacctcccatcctcccctgtttccccatcccataccctttctgctccccagagagggtaacaccttccatagggggtcttcaaagtctgtcatattctcattgggatagggcctaggctaacccccttgtgtctagtctcagggagtatccctccatgtgggatgggcccctaaagtccattcctatggtatcaataaatactgatttactacaagaagccccatagattcctaaggtctcctcattgacacccatattcaggaggtctggatcagtcccatactggtttcccagctatcagtctggggaccaagagttttcccttgttcaggtcagctgtttctgtgggtttcaccagcctggtatggacccctttgctcttcacacgtccttctctgcatctggatttcagttcagttcagtgtttagctgtgggtttctgcttctatttcaaccagctgctggattatggctatatgatggcatatgaattagtcatcagtctcattatcaggagagggcatttaaggtagcctctcctctgttgcttagattgttagctggtgtcatctttgtagctctccagacatttccctagtgcctgatttctctttgaacttataatgtctccctctatttattatctcttatcgtgctctcttctgttcttcccccaactcaacctccctgctccatcaagtctaactcacccctcctcttctccccttctcattctcctagttccctctcccctccccgcatgctcccaattagctcaggagatttttgtcccttttcccttctccaggagaccatgtatgtctctcttagggtcctctttgtttaccagcctctccggcagcctgggctgcagactggcaatcctttatgtctaaaatccacatatgagtaagtacacacaatgcctgtcttttgtgattgggttacctcactcaggatggtttcttctagttccatccatttacctgcaaatttcaagattccattgcctttttccccgctgagtagtactccattgtgtaatgtaccacattttctctttctgttccactattagtcccaatggtggttgagaaaaggtgcctgctgttgttaggtgaccagtagattttcctgaaggagagttcaatttttcctgttttgctacgtcagtttttaggtaatatttgactttttttccttcattaggtattacctgataaattcactctctgatgtatttatttgttacttgggaaatcttactagtttgtggcacatgatctgttttacatgttgttgggtgttttgttggtggtgtttggtttgctttggttttgagtgtgatggtagtggtcagctagctgtcatggtctttctgtgtcctcctttcagcttgagtaattggctcctatagctctgcctgacttgtatgttcagtactggggatttgaaggcaagtcctcttgtttccaaagcaagcactcataaccattaatccatctcaacagccccaatattgatttttgttactagcttttgcatcaatgcttataggataactttaatttttgttattgaattatatgtgaagactttgtcttagtttgtttgagtaaatttaatttgttttatttaataatacatggtaattcagattttctgtttcatcttgagttaaatttgatcacatatgatttcaaagagtttacctatctcatatgtgcctaaatttattgactacaattttcatcatattcataatcattttatatgggcagtatctatattccaagtctttctttagtcattctttcctttccttcctggttcagctagctagaagcttatcaactttgcttcatttagaaaatattttgattgggttgtgggacacatgcctataacccatcacagaaacctaaagcaggagaatggcaacttctactacatagctacaaagagataatgaaagaataatttggttacattgaaattatttgatttctttttttcttcatttttttgtttattgaaaatagattattttctcacttcgtatatcctgattatagtttcccctccctctactcctccaagttcctccccacctcctcttccctccagatttattccttctgtctctcattcaaaaccaggcttctaagagaaaacaaccaagcatgacaatataaaatataataagatgaagcaaaaactatatcacagttcaacatgtcaacccaacaggaggagaaaatgacattatttgatttatactccctgacttcagttcaaatatttaatgtttattttctcttatttaatttggctttaatttactctttttttgaaatgaaacatcaaataactggatactggccattctttaacaatataaacgtgtaaacatgtaactaacacacaaatttttatattttatgttttatgctttcacttccatttagctcaagataggtgccaattattattttttaaacattttattgccttgtatttatttatcttgtgcgcatgtgtgatgtgtgtgttttatggaggcatgcacaggccctcacacaactgtggaggtcaaaagaaaacttagaggagtctcttctctcctcttactttatggatctcagggaccaaactcagagagtgaagtgttgtagcaggtacctttgtctgatcaaccttcttgggaggccatgttccaattattcttttgacttgtcattgacctgtaaagtatttaagagtattgttaaatttataaacattcatagatttctgtgtgcatttattattgatttctaatttctataccatgttagaaaacattgtgccatatggctcattctgagtgcatttgtttcaaagttattttctattacttatttattttactttttgacattataattacatcattttccccttccttttcccttcaaactcccatatatccttcgtgctctcaaatttatggtctcttttttcatcagttattgtcaaattcatatatgtacatataatcataattatataggcacagcctgctcagtgtatagtgttacttgtatgtatgttttggggactgaccatttagaatttcataataggttggtgtgctcttccctgaggaggactatattttattgtttgagaatttcaaacatgcttatcaatgtgctttgaacaaatcctcctcccatccctccctatcttttgcactactcttccttcccaactccatctgctctttttttttgggggggggggtgtttcaagacaaggtttctttgtggctttggaggctgtcctggaactagctcttataaccaggctggtctcagactcccagagattcacctgcctctgcctccccagagctgggattaaagatgtgagccaccaccgcctgactcacctgctcttttttaacccatgccattctgtctatatgtgcatggttgtaggaccatcttctgaagcatgagtagtagccgctcaggggtcacatcatttaagaactgaccctcccacagcagtcatcagttgccagtagctcccccactacagatccaattttatgagttcctcccctacctatgctggtccctgaccccccaccccatttagggaaactctatttaaattctatttgtatatgtatatctttgaggaagcttctatggtagtttccaaattgctttggtattagtcgttgctccacctactcctttttctaccctgcactccattccccaccctcaccccacttaacatttcctcttccattaatccctttccttctttgtaccatctactttcttttggggggttgtttttgtttttgttttgttttgttttgttttttattcaaggcagggtttcttgtatagatctggctgtcctggactagctctgtagaccaggctggcctcaaactcacaaagatctgcctgcctctgcctcctttctatccctttttttcttaaaaccacatccaataatctccttaccagctatctggcttctatgagtattccaatccaaaaacacattatctaaagagtgtaagttaacatccacgtctctgcaaatgttacagatacttgaaatgaatgtatgttcttttgttaggcaagcatcctgttgtgcaagttggtagaaaatgtgcattagaacttcattatctttactctttctcactacttgttacatttattagaaagaactactgaggttatcaacatttatatttttctctttcctcattttagccttcaagctctgttatcaggagtgtcctaatttagaatgttatctctatgatatggactatctatttcatcactgtgaaataaccatgtctgacttaactaaaggaaaatatacctttagttgaatacaacaaatctgatagtgatgtatcctctatagtattcttgaaaatagtatttgcacagtatatcatactccatcttacatttaagctacattttcccatatgtttaaagtatgcttaatataggaaggtgtgtaacagtcttgtttcattctgatgatctcactattttaactaaacttaacataattattggtacagttgggactaatctatcactttgctattaatacagctgtatgaaccaccttttctttgttccatttttcctttttcctgtcttacttggattaattatgttttaagattctatctcatagccaacattggcttattagctgtacttctttgttctacttttaagtggttgctcaggggtttataatactaattattcacgtgtcatagcatacctttagaaaatattataccacttcacatacaacatcagatcacaacaatggattccaatccccctgcctattcatactgtcactctttccttacactttagtctgcatgactcaaactccaatatatattttctaaagatttaaaattattttcatttattaataatttgcattgaaagagagagagagagagagagagagagagagagctctgtgtgtttgactaaacattccacggcacatgtgtgaacataaggtaacaactttttggagccagctcactttctttagtttttaaagatttatgtatttatattctatatgtataggtgttttgtattcatgtgtatatctacatggtatgtatgtgcagtggccacagaggtcaaaagaaagcatagaataagatcctctgagattggagttacaaatcattgtgagctgccatatgggtgatggaaatcaaacccaagtcctctaggagagcagctggtcttctttaccaccaagccatctctccagtccccacttctcccattcttatatgagctctagagagtgaaaccatgtcatcatgcttgcattgttgagattgcaggtgcctttgcttgctaatgcatctggtggtcccttaaagttattttaaagtgtgtttgagatcaacttagacgctcacagtttctgacttccttcactcctttgtggatatccttctttcattgtggtattgcttttctcccacttgaagaacttttaatatttattgtagtgtaggtttgtgggcaataagttttcagtctgggctgaaaaatctcaaatgagtcttttttttctgaatataaaaatctaagcatacagacgttatccgtcaatactttagagataactgtgtcattgcctctgattttcactatcttccacaagaggcctaacggctttttataattctgtgaaaactgttctggcttaatttctgttgctgtgacagatacattgaccaaaagcaacttttggagaaaatggcttattttgcttacaattccaggttgtaagcaacctgggaattcaaggtagaaacttaaggcaggaacttgaaggcaggtattgtgtagcagtttactctacaattgaaactttccatcctgaagagaaactcattaagcaggaaggtaaacaactcacaattgctactgaagtcacctgaaaatgtccatatccactagtcccctccctaccagagtaagcaatgaaagcttaagagtggctctccagctaaaagaagctgcaaagaagactcagacaagccaagctgcaaaataagattgaggagatcagaccagctacctgaaagagacagaaaccaagccagttgtctggcagagatttaaatcaactgagacagtaggaaagacattcccaaacctggggagataccttccagctgtgcagtgctctatatgttcctatctttgggacctgtcacgcatgctggcgtgggctttggtgattcagctgtctctgagtcatttctgctcctctaagtaacccctcacccatatatctgtaagtaactcaaaaaaaaaacaaaaaacaaattggttcaccactttggtggtgtccatactttagtttgtgttagaatccctttctggagtgaatagggatgtgtgttgtgtctccccaggaaatgctttgtcatatgacagcagtctggcttgctatactacacattaacccaaatcaaagaactcacttcacagcaaaaaaaaagtatataagaaactattgaggaagatgttgctggctggctggctagctggctcagtttacgatcatctacctaaggattggtgctgctcatagtgggcctgttcctcctacatcatttgataaccatgacaattcctccaaagtgcccacaaaataatctgaactggggagttcctcagttgatattatcgtcctgtatgtgtataaggttttgtcaaactgacagttaaagctaaccagaacataagcaatttgtttttctctgtgagcttttaagaagattttcttttcattattggttttgtcaatatcgttcccttgtatggtttggggtgcaggaatgtaggaatgaaattgtgttttttctctttcttgtgtttcactgaactttatcttggagtgctatagtttggatatcattggagggattattggaaggttcatatttgggaagtttggttctccatggtggaggatgacagttaaagggacaacttttgagaagtgagacctagtagaagctaatcagatgaaaaagtaccaaccttgggagggattaaggaaaatctcatgcatctgaattagttcctccaagaatgggttatgaaagaaagaaagaaggaaagaaagaaagaaagaaagaaagaaagaaagaaagaaagaaagaaagagggaggagggagggagggagggagggagggagggagggagggagggaaaaggaaggaaggaggaaggaaggaaggaaggaaggaaggaggaaggaaggaaggaagaaaggaaggaaggaagaaggttccccagcctcctgaattttgtttcacatgcaatttaacgttttgtcatatgtttctcccataattccaagcctctgccaggaaacaggccttagttttggtttactggaagtggctggagctgagtaaatagtcctcaggtaaaacaacaactcaggggcaacccatcagcaggcactcccttcaccttctgctggctcagcaggtgaccacagtctcctgacaactaagatagctttccccaccctgcccctggaaagtccctagccactagtgcctcccaccagtcagccctcagactcatctttcctccaccaatcagccccagattaatccctccttcctggaattaccctaactctggcttaaatggagcttttgaccttcttttgggggtctccatttgccaccccaacactggatgaagaaagtgctcttgtttattgcatatgtgactattggtcttttgggggggctctctcagaccctaacactgagctttgttctagtataaatttgggttacttgtgggtcactttgacccttgtaatttcttcctaaattgtatgtggtgtatcactagacttgattttagggttaaagccaccaaaccctcaaagtgtgttcttcctgacatcttagttggatgtttgggatgttcagttaatcttctctgctcttcagccaggtctacagtgagaatttctatctgactttacatttccccataactgttctctgactgctttagctcatcttccctgatgcatgcatgcttcagtattctgtgacagaccagggtgggagatgcttctgctttttctagagctcttatgttgtgcagctacccttccccctgtactttccgtcataacttgcacagttttttactgcctattgtccaaaatctgataagagctgattcatatattttcccattaaaaatctgttttgaaaggaggaatcaacagtgttgcttccttgactgagagcagcagtgcataattgacttacttgacgttacacctttttttggatattatcatttgattgtgcttcagcttcaaatttcctgttatctcttactctgtagagaaaattttaaaaaacagtgctgtgctttccaccactggtgcagtgttaagcatgtcatcactgagcattgcaaagatgctgctcgaaagaggcttcccttctcagtcacagagtgatccacatggcaggttttctagcatggactggtttcactggcaacagattcctagtgtaagcagctttagtagcaccccagaaaatatggcagtaaatagtcacctctctcagagtctcttactgtagcaggctgcttccagaacatatcttatcccaaatagctttctggcaaagtctcaagtacaggtttcaagcaagttctcttaaagtgacaaatttccatttctctgccatataattcactgaggctttccctcaatgcttctggtcattggtccacctcctttggatcaggacccaccttgactatccttctagctaccgggtatatattcctcattgtataagcaggaactagaaaaataaccatagagtgggtacttgaactaattaataaagaatacatcgaacgctaaatgatacctatttattatctgacataaatcaactcagtagggcattgcatttcgtaagctggtttcaagatttaaagtaattcacaaacttgaaaactctctagcaaaagaaaggtcacgtgttcttgagggagtatccagccccactgattcaagcacacactgtaaatcttcacctaacctcccacaaagaatctgaggctatatactactgttattgcatctctgctattgcttcttgcagctgctgtatgtatcgtaactcctaatagtcttttaaagattttatctctcttttttaggcaaagcctctcacaacatctccacatgcattataagcttgcgatagcatgctaaatgtgctctggtgttgtgttttcaaacagttgagagaattaaaaggtatcttttcatatttacccacatagttatctcttctagtcatcttcatttctttctgtaaatctaaagtttgaatctggtgtcattttttctcaggctgaaaagcttcctttattgtttctagcaaagcatatgatttctccctttcactcccctgaaagtgtgtttactttgttttcattgttggtgctactatttcctgaatacaaatgtctggtctaactcaaattatcattcagttgtttgctgtgttccattatctatcattagttaaattactctgattgcatgatatattatgtgtgccatttaagtttttgcaagttttcaggatcctcatctttggttttaaattatattttttacatttattaattgtgtgtgcacgtactgttcaagtgtgtgtgtgtgtgtgtgtgtgtgtgtgtgttgtgagaggggaaatgcacatgaagtcatagaacaatttgtttgtgtcagtcctctctttccattatctaagttctaggcacttggattccagtggtcttcttgacagcaaatgtctttacatgctgaaccatctcactggcctgggtattaaattttagattccaagaaacataaatttgacattttttttcttgcttgggattcactgaaattcttgggcttaaaattttgtttttaactaatttgaataaattttaccaatgcatctttcaatgtttctatctatggtgcatccaatcctttctctttaagagtctgagtgtataggcattagatttttttcttgttgcccaagtcactaagactgctcctttttcacccatttttctatgttcttcagattcgatattttttatttggtttcaagtttcttgactctatgctacaatgttaccaaatagttaagtagattaacaaatttttcttttttcatattcaagtctagatttcttgactgaaaagccatgactgttcacttactgtagggagatagttccattagtccttgaacctatatatgcttagtgttttaacactcctgaatgctaatatacatcctttaaaggtagttttataaagatggcttcctcttctctgtgggtcagaatttttcctttgttcttgtaatgagcattttctaattgaatactaaagtttgcctatacatggtagtgtttctggatttattaccctcatgcacttgtgctgtgagtaggctccatttgaggacttctaggtttaacacaatgcttgcacttagcaaaatcattcactttaacctgctcccaccaatatacccagaactgacaaattacaccattctctcttcttgttctagactttctgtgtgtagcacttataaccctgtattaaaatgagttgcaagcagatgcctagccactcaaagcagcacacaaatattatttaacctatgcatccttagtacctagcctagtgcctgacacttaatgttgggatgcttgttatatttatagaaacaagtgaaataattaaaactcagaatccatttgattgttaagtcatagttcataaaatactgcaaaatataggggtcaattatttaagtaaggactctgatacaaactcagttcagttccaactaaatatatcaagttcccagaatttacattcaaccatgattataatagactttgttacaaggtctattacaagccaagaaaggacaatgtttcagaaagaaacaatcaatattgattgaaatgaagctttaacatgtgtaaagtaagggtttcttgattgtttatttggtttttctagacagggtttctctgttaatagtcctggaactcactctgttgtccaggctgtcctcaaactcacagagatccacctgcctcggcctcctgagtgctggattaaaggtgggcaccaccaccacccagaaaaaagtaaaatttatatattaatcatagtttgttctctgtttaaaaatattgaattatgtgcatgtatacatatgaataaaataatatgaagggtgggataggtctatttgtaactaggattcacttctgtttcactcttactcctacctctaatgactggtgttatcttggagaactttaaacaactatccacaggtgtggatttatctgagcacaaactgaatcataacaggaatgcttacattaccttgcaggagtgctatgggcatcgaactaagtcatgaatgtaaagggactttttggactgcaaagagctgtagaaataatagagatggtaggtccaatagaccatgtccatgacaaacacctgactttgacaatttaatgcaagaggattgtattggggctcagctttttggtgtatgatcagttagctgccctattttggggatgtggtaaggcctcacacagtggcagggaagacattgaacaaagctgatcctctcatggtggccagtgagaaggggtgggcgtgataaaatacagcccccaaggcaatgccccagtgacacagttcttcttttttttctctttttctaaattaattttatttaaattgagaacaatcttattttacataccaatcccagttccctctccctcccatcctcccatgccacccacagacccccaccaacccaccccccatccactcctcatggagggtgaggcctctcatggggaattatcaaagtctgtcacatcgtttggggcaggatctaagccctcccctgtgtatctaggctgagagtggagctattgtttactccccctcccatttgatttttttatttaaattagaaacaattttattttacctatcaatcccagttccctccccctcccatccttacatgcatcccaccaacccccccatcccactccctatccactccccagggagagtgatgccttccataggagatcatcaaagtctgtcacatcatttggggcagggcctaggcctgcatttaggctgagagagtatccctccatggaggaatgggctcccaaagtccatttgtatactaggaataaatactggttccacttcaagaggccctgtagactgcccagacctcctgacacccaagttcaggaggactggttcggtcctatgctggttcccaagctgtctggctggggttcatgagctccacttgctcaggtcagacacagttcttcttgatgggtccaacatcataaagtttctataatcttcccaaatagcagcactaggcggagaacatgatccttcagtacacgatgcttttgaagggacatttcatagcctaacagtactaaatgagataatacaaataaaccacaccttccaacaatgcccatcacatcaaaactccaaatcctagctccctgtgctctgaaacacacaaatgacctaacacacacattctctcacacagcaacagcaacaaagctgacatgatttttagacattttaaatgtctttttcaaagcaaagctctctattgcttttatgtctttaactgacttatcttccctgctcccttctttcctctctcttccaccaagaaacctgtactcattgataaaatattttgttcttattgttaggttgctgaagccatttgttcttctaatgtgtcagagaatgtaaaaacaccaagtaaaacttttctctggagaagttacaaaatcaatgctgtgaagatcacatcatagaaattttgagatctatgataatctttttataacgtttttctaaaagatacattttttgaaatatcttaattcttgatgttatatctcaggctaaagagcacttgcttgtaagtttgtcgaagctattttcctgattagagttcaaacatattgatccaatgttagtcccagttccttcaaaataatgattttttcctagttttaaaagattcattgttgcaaatatgtgagaaagtaacaaataatgtaaacagttctacaaggaggaaaaacactttcaagtgtgttcccgtgactgttacctctactctgctcatttttttctagttaactttgtatgagagaagtctaaaagagggacaggggaatgatatgccttatctactaacatggaaatccttgaacacaaccttccactaagtcagtgttcacacaatcagcttcctggagatgtattatgcacctaatgttgctctgctaatactcaacttgatggtggatcaacagaggagaatgaagcccctatcttcctaatacttcaggatttttcaccctccctcatccaaccacacatcagttgaccaaatgccacacaaagttagtgaaataatactactctgtgagttcttccctggtctcctaaataaacttgtccattttgatcttatatttttaagaatatccttaacccaaacaataatacctcacatgggccttcagcagggttttgttgttgtttttgtgcttcttgtcattttgcctgacttcccccattgaactataaataacattaaaaaatggtttctgcattactcattattggagccccagaaccagttaattgcttggcacatagtgcttgagaaatgtacatagattatataaataacattataggcgttttttgatgaacaaaagaattgaataaaagtggtactaaatgaatagagatatttgtaatgcacaaggggagaaaaataaaataaaggaacatgagtatggcaagatattgggggatgattataagagaaaacaatgaaaatagccccacattagcaagcaatacaggtattgtggataaattataggagccaagaacaaatgactcattgtccatgactcatccaactgggaggatctggggctgcttaggtttgcccactcatttgctgtactccagctgtctcctgtagtgagtctaaaaccatgcaaagcatgtaaaacaactcccctggtgggttgctcacttatttctaagtgttggataggataggagtggtgccaaacacttaagtaatggggtaagaaattgtaagccctcgataaatattatatttacccctgatccccaaacatctcccatcttagacaaaataaaattgcaataactatgtgagaaaaatagatgtataaacggatgcaccctgagaatagtaaaagaagacatggaaacaaaagtctctaaaagaagaaattagaatttgtttcctatttgtgcaaagaagagatacttatattgctacaaagtctttaaaaaatataatggaactcccaactgggtaagactgtcaatgacttttcccccagaagactatataggaccttgaattagtttgagagctaaccaatagacaggaagcttcttgtttagtacctacttgattgttccatgtcctgtgaccaatatgtgtactgtcttcagcaataggtcttaccaccaagttataattggcaaccaaaagtaatgacagcttgctttggtagcccttggacattatcagagaagtttccttgtgcagggcataatagttaatgcagaaactcccaacaggtctaagtgtagagaataggtatctggggattgctcattcagcaaatgggacatctacatcacacatccttcacaagtctcagggactgtcacagaaaagcaggcaggaagactgtaagagccagaggtcagagagtgttgaagcaaaacaatgtcttctagataactgtctactatgatttcattaaatcataatagctgtggtttcctgcaaaaagtatagcaagtcaacattcttacatgaagtaggattgggattcatgagctcccatccctgagaatctatgaacagttgatggttttggatagagggattatcaattttcttaaaggatgttgattcctgagtgtagatcagctacactctaactgatgaccccacatgcagaagtgtatggacagcacaaattagaagtgatggattattaaataaaaacaaaagagaaacagaaagttaggtgttgagattgggatggagatgggaggaatttggagcaaataggatcaacgtgcattgtatggacttctcagagaattgaataacaatattttagattaatatagtggctaaatatattcatatttatgcagaaaatttagtgaattgtttaaaagagttcaaaacattctgacaaccctagcataccaaagtaattgtgagacttaggctgaggttcctcttgtaggaggctatcagggggctttaatcaataactctgacatcagccattatgcctttgaactggcatggtttcacacaaatgacgcacacagaggaccctctacatccagcctggacttcctcatgtatctatagaacagagaaagccacaggccacatatgagttgctcagcccaatttctgtgagtcagaatggaaaataagaactacagatattcgatatatagtagccatgggtgtcacaaagttggtaaaaaaaaaagttgttttcacatctttgtctcttagaaaattttccagctcttttctgagtagagataaacaaattcaagtgggaaaatctgcaacacaaaatatccccaagtcctcccttttgagagttaaaaataatatactatgatcctggtaattttaacataaatacctgaagaaatattaaatttgcacagtgtgcttcaaggataaaacttaatagcatttaacttaaactctggaatcagcacagcccatatctaagaaagcaacctcaatttcatttcagctgctatgtaaaaattaaaggacaaatgtttccatagattgaacagagtcaatatgaaaagtatgagaacaaaagcagctacagagaagcttcgttggtatgttttctttactgattagcctatggaaacaagacatttttactttggctgtataggaaaaaatagatgtagaaattgatagtatttaaggagtcaaaacagctaaataatgaaatatgggtcttttttttgcaaaggtctttacctttcagtcaataagaatggagcaaatcctctgtaaaatggctacattttaacacatcaggatgaaggccttttctcttgagcaagaagaaggaagttaaagctgttgtccctgcaacttattgtccattgtcccctttctactatgttacacttgtctcttctctacattgaggatggatagaggactggattgtctgagagtctatgtaaagtggaagccaaaagaggtttccaaaccaaaagcatctagaacttaaataagtaagcttaatccaatagaaaatgattcttagacctgagatccaacattacagccaaaaatttgtcttctgccatcactgagacattaaaaaaataaaggcatttctactctctacattattatctttagtcattgtattttatgagcatgtagatcgtggcttattggtgagtagacatactggattaaagatttgctgaccaaaaacaaaagtaaaaaatctgttaagaagtgtttctgcccacggctctgcacagagcatccttgacctctttgttcctgagactgtagacaacagggttcagcaagggagtgattatggtgtatgtcacagagagaagaagatctttttccactgaactttctgacttgggtttgaggtaggcaatggaggcacagccataatggacaatgaccacagtgagatgagaggcacaggtggcaaaggctttcttccggccttcggttgaggcaatcttaagtatggaagagatgatgaggacataggagatgaatatcagtcctataggcacgagaatcacaaatgaacttacaccataattgattatctcattgagagtggtatcaacacaggaaagtttcattactgggtatatgtcacagaaaaagtgttccaccactgtaccacagaagggcaaattgaacatggctggcacatggagaactgccataaccagaccggtgcccaaagatccacaaaccaaccaggcacacattcctttgctcatgatgaccatatatctcaggggatcacaaatggccacataacggtcatatcccattgctgtgagcagaaagcaattgttggtggccagggtgacaaaaaagaacatttgggttgcacagcctgccaaggatatggcaagattgtgaaaaatcaggctggagagcattcttggcacaatgaccagtgtgtacacggtctcagaacttgccaacatgctcagaaagaagtacatgggagtgtggaggtgatggtccatgcacgcgatcgtcacaatggtgatgttgccagccagagttaaaatgtagatggttaggaaaaccgcaaagagggtcatttgatgatgtccaaagctagagaatcccaagaagatgaattctgtcacttcagtgaagttctttctctgcattctgcactattggtgtctaaagtgacaagaagggccatcaagaggaaactttcatcagcaattgaactttaaagtagggagtaatgatagctgacctgagagagtgaacctacttccctcctttgtgaccatcatgatcacatctagagtatttgtccatgaaatgagaaaatttacacatctttttggaatttatgtatgtaaaaatgagcaaacattcctgtgcaagaacacttcctagtgcatgctcacctcacacaatatagtgatgttaagaaatgaaagggggcaggacagagacagacatgctctgttcctcacttaaacactcttaacaagaatcaggggtaagagaggatgggagggagagggaacacggggattgatatgtaaaatgattgtttctaaataaacaaggaaaaaatgcacacaccaccacaaattgtatcaaagaaaagaattaccaataaaggacatgccaagaaaatcataaagatggatgtatatagacaaaatgaataagtagtaagaggtgttggaggaagatagactttgaaaaaaaatggtgacaaagccaagaaccttttgacatagcgatgcaggtaaattctgaatgtgaaggcttgatttcatcaagaaaatatgtgtagggtagatcatactgtcaaagaagaacaactacaaaatggcttctaacacattcagtccgctaaaactgaccacccaaagctcaaagaaatatttatttgctgattgtagtagtgtttggggtgaagtcaaggaaagacttgtgactgagaaaacaattagtttctactgtaatcaaaaagaatacttaagacaatgtgagatatagagaaaagaatatagacttcatagtttgagagggaaagagtgggctaggtatttggagcccagctgatgcctattttgaaaatcaccaaacagacagtttgatgtaattatgagactcagagaatagtagtctcttgttaaaaagagagaacatatgggatggcaatttcattgcttatcatgcttgagggcttgggttcaatctccaaagctgcatggagcaggcatgacggcatacttggaggtacaggcataaggataggaagtaaaggtcaccctcagctgtattgtgagctcaaggcccacagcctggaatgagaggggcagagacagacagaaagggagagagaggaaaatataacctgtaaggagagcatgcacagtaacaatttcattattcctgttccatttccagggttgctaaatagaattcctttatcacattctctaattctttgcctgttggcatcatgtgatctatgcttatgataccattctctcagatgtcactggagaagtctccattgctaaagatctcacactttgttttttcttcctttccctgtcctttggtttgacacatctgaccctacctcatggaaacgctctttagccttggtttccatgacaccacattgtttctgtcatccctgtgcttatgtagttacttccatgaatctgttcattctgcctgtaccatgactacattcctgctctctggcccatcctttgcccttgctttttctatccttgcaaattcaattttctctgttgtttctatgttgattgctttcaaatatctatttctatcaacaatattttcccaaatatccaacttatttctctcttgacttttgtatgtcatgaaattacaacaatcttttttgtcattttataaatttaaattataaacaagcttgttttacatgttaatcccagttccctcttcctcctctcctcctctgacccatcccctttatgcccgccccagggagggtgaggacttccatggggatcttcaaaatctgtcatcttttggagcagggcctagaccctcccccgtgtgtccaggctgagagagtatccttctatgtggaatgggctcccaaagtccattcttgtactagtgataaatactgacccactaccagaggccacatagattgcccaggcctcctagctaacacccacattcaggggatctggatcagtcttatggctggtttcccagctatcagtctggggtccatgagctcccttttgttcaggtcagctgttctgtgggtttctccagcctggtcttgacttctttgctcatcactcctccctctctgcaactagattctaggagctcggcttggtgtttagctgtgggtgtctttatataatttttaaacaaattataagtcatccattgtccactttttgtatcttcttcagtgacctcatgatatcattatagtcagaaaattctggcatcctgaagttgcatctactatatgtaaaattcagtagactttccttaagttcttacctaattctgtccaagtttttagaaccattgtgatgtgtctaatgttaaggtgttcaactacctgtcataactcgggtctataatctcagcactgcatagcagaggctgaaggcttacaaggctcacaaccaaccccaatcactcagaaaaaacctgtctccaaaaacaacaaacagcaatcattaaagtatataatcctctaactaaggaaacaaaacatattctcagtctaaaaatcatatgcctgggggctggagagatggctcagaggttaagagcacagactgctcttccagaggtcctgagttcaattcccagcaaccacatggtggctcacaaccatcccttatgagatctggtgccctcttctggtgtgcagatatacatggaggcagagtgttgtatacataatgaataaataaaatctttttaaaaaatcatatgcctatggaatgacaaataattttggaaaaagagctataaactttaggagccaccctacttcagttactaaacagacccacatggtatgacatggacacaagtaggactctacaaatcatcaatgctgtggttctctgtggctaccatttcattgccccttattcattctcagaattactgaggcagacttcttctatcacatgctgtaattcctagcaagctggattgactaagtttatcctcataaacctgttcattcagatgcctctgaagaagttgccatcactagtgctgttggccttttgcctttttccaacttattctcattcttctctgcttcatttaacacttctgtctactgccccatgaaacacagaaagatgtaattcagtattcaaaagcgtaccatttatactgagacactcaggtgtctcaatgacacattttcaacaattgctcctagaataagcaaatattcatgagggagaaaacaaacctcaaattttattccatgacacatgcagaagttgttgtaaatgaatcacaggcatgtttaaaagacaaagtaataagaaattcgagacaaaaataagagatgaaaatctgtgaccctcaaataatgaaaggttcttaaagaagtaacaaaaggtttaaattaaaacagagaaaaattgtagcctaagcttcttcattgttagaaaaacaaaaagataaaccatgccctagtagaaagcattcacaatataaaaatctaaaattatatgcagaatatataaagaacttgcaagtcaacaataaggacacattttaaataggcaaaatatttaaacatttttaaaagattacataagattcctaataatcatatgaaagaattctgagcaatgttagccattggagagatgcaaagtaaaaccacagtgagatacacctactcaagtggctaaaattaaaaagcctaacaacacccaatgtggtaaccaagtaaaagaactggaagtcttaaatattaatggttagaatgtaaagtgttgtagcctatttggagaacaatgtggcatttttcttaacttaaacctataaagcatctatgactcagtattttttcctgagaatttatacaagagaaacaaaaaaaagtgtccacaaagagttatttgggagtcattttcctaaaagtccaaagctgcaaacgatgcaaatgtctaaattatgatatagctatataaagaaatattcccagataattaaaagtgaaaacagggtctggagaattgccttggcagctaaaacagttgtttcttgtgcagaggatctgggttcatttcccaggatacataaatctgaaaacttatcaaaattcacaaaatgtatacaaaaattaactatacactgtattagattttgttgcattacattgtatgacataatattgtgttatacaacattgtataataacatgctgtttgtctttatagtcctgtgaatgctaaacaactactctaccactgaaccacaccccaatcctcttgcattgcatcatggtgtaatattttaaagtatactccactagagttgatacttacaagtattctcatttgacttagcaagattaattctcagggggtaggactgcagaggaacactgtagtatgagaaagattggaattaagtaacacttagaaaacctggatctggattttgagacttatggatgccaaaacatgagatctgggacaggtcttgtttttgtgtatactgtggcttcagactgagagttggagttggagagttaaacaaattgtctgagttctaacatcctagtcaacactgctgttatgatctgagaaagacatcactactggactgataaggattgccacatcattctcagaaagtcaatatgctctataccatctcctccactctacgatgatagtcttccctgtgcatagggacattccaatatccattatcaaacctgtgcctatatccatatttttaaatcttacctggaatggcttttatttcttgcaacctattcagatatgaggcccttagtacttggaagaacacccgcacccttcccagtacacatctaggtgacaagtgaaattatgttctcactcttggatttaaaactgtagaattctaaacctatcaaactagaatatatctatttttaatttttaaaactgtttcatataagcattttaagactcggctcattgcctaccacatccatgaagtcctgtcataacagcccaattccgcactcccccccttttttcataaagattgtacccactggagtactgaatcctgtttgcatcacctcaccacagcaggctgcacacatcatttcccagctccatattcaaaagttgcatgtttgctaaattgaaatctatggagaaatatttttatctcaggaactaacaaatattaaaaatcaagacttgtttatttcctgagagttggttgttaatacttaccatacaccacttattgtagtttaattccccgctgctttgtgaaatgttgtctgctatctcctttggggtatttccacttcaagtcaaagtgtaaagtctctaaatacgtgctaaggttactacatcaaactcaaggaagcactcagtaagttctccctggctcaataatttagaatcctcattgcaatgtaatttagctgtttgacaaagggacagaggtgctacccataaaaatagtgggacctaaaaggagggacacctctatacagcttcctggaggggaaagtgatgtatttttccacctttcttcacatcttcctgcaaggaatcaaatgacactgcaaatctagaacaactttgggaagggagaagagtggtttaagaaagagaagatagccaattcagagagttttcacttactgaaaattgagtatggcagatgacagtgacagggagataagggatgatagagttggtcagcttttcattagtaggacttttcaggccttgcttctgctttgtgttcaatgcatctactgtccaagttaagagtttagagttaggagaagtattagcaagtcatctgtgtatatcaacatcactattgctcctgagccctctcattatggttgttgcacagatttcaaactcacccattcttcaatcagttgctgatatcaatccccaaatataacacccaagtgactgtgtaactctaagaaacacgtttactctttcagtcacatacatacatcagttatataacagcaggactgatgtcaaataaatattgtgaggattaaatgatctactccacttaaggacttaggacacagtacatgtttgatagtttgatagttaaaattatctttggcatggatttgtagcaaagagaagacattcaggaatttctagaacatcaaggaaaacaaaacaacaaaaatacagtatgaattgatgaaagttgagagggtggaagagagggagggtttgaatagatttaccttccaagaaaataacactgaaaaagactaaataaatgaaaagtttgtacacccaatattttggttatgaagaccgtatgtcaaatattgaaaatggaaagaatttattatcaaatacattgatagaaatcatgtctaatttacaaatcttagtaaaagcagtgatgtaatagaaaactttttaaaactacaacttggatcagttccctgaaaattaatgtgctatgtaaatgactactgcagaaggcaaagaaagaaaactctagaactgcccctcctgagagttggaaacacagttctaaaataaagaaacttatccaaaaatctgtgattattatatccgtctgagtaatataaggatgaagaatgcatgaatgtagggaagaatctgtaaagttatgctgttagggactgaactcaacaagcatttttgtgatgtctcatttcaggtcttgaccaaggatgagcacagggccaattggactagaatatattaagaagaatatatggcattcccaacatatctcagatctgttctgaccatatctgcaaagcaatgatttttttttaaaaacgtctttatgcctcctcaaggaaatacctcagagttgctcacctctctccagatccagatagcagtgttgcttgcagaaacagtagtgtaggacacaacatactcaggtgttccccaggctctgaaacggatgctaatagaagggaaagcttctgtgagttcagagatgaggagggaatctcagaaggaagccatgtttctaccctgccctcttgggtttcctttcttcacttttccctgagcatctcaagggaaccagaagagtcaggttccaaatagataccaggggattttattaaaaatgaggtttcttactgtcttgggcattgatgctttgggatccccagagcttgtctcccaggtgctttctctccttcattcagaactttgctgaagatgtcaggtgtatggtccatggattttctcttcagaagacagtgcactcattgacttggtgtttccaaggaagaagacatttctggaattagttcaatctcagctggacagatttttcttagaaaaatcatatcccacaaggtggtggttgttggtacacacctttaatcccagcactcaggaggcagaggcagaagcagaggcagaggcagttggatctctgtgagtctaaggccagattggtctacagtgaaagttccaggacaggctacaaacctacagagaaaccctgtcttaaaaagtcatatcccaggtactaattgttaggatcccaagagactttgattgtgtataacagatttctggcatctaaagttccctatacttgcacaatgtcaactctccttggatgaagcaagttcctttccacaattgtgatggctgttcttggttgtcaatttgactacaactggaatcaactaaaatctaaaaatagatggcacacctgtaaggggtttttgcttaatttgaagtaggaagatctagttctaacccatatgtttgaggtaagaagatacacctttaatctagatctttcgagctgggaagacatgggtttttcatccagatattgtggtgagaagatacatgcctctaacttgggccacactttctgctggaagcctatgcaaggacacggaaggagcaagcttttgctctttgccttctttcccctctccttgctagcaagcccattcctttattggagttagagcctatttcttctggattccagtgaatgctgaaaaacagttaagacatccagtcttgtgtactgagcaactactgggttcttggatttcggttaacagtcagccatttttggagtagagaaccctaattaatacaaaatatatcccatgagatccttccaagactgtaagagtgaagtttcaatttttctcttcaattcatgttcattgtttgtctttcatactataaatgatagaataatagtaagatttgatatacctttattttttaaaaagttattttttattattttcaatcatatatatgtctatgtgtgggtatgtgaacatgcatgcaggtgcctacagaggtcaaaaagtggatttacagatgattgtgtgctgcccattgtgggtacggggaactgaactctggtcttctggatctgcaatacatgctcttaaccactaagccatctcagagcccttatgatataattttaattctttataacttttataatgctagaatggctcatgttaagcatacacaaggatcataataaatagtcatatcaactatggcatatgtttccatccagtgcaattaaatggtcttaaatctcaacactgtctcaatggaagtcaaaatacggaatttctgacttttatctaaatcctgttttaccttgtgttttcaatccactaaccacctagttcaattttatcttcagttcatagtgaccttgacacttttgcacagcccttaatattttcaaagttatgtgaagcaaatatataaattcttaagtccaccttcatttatctccaaggtctatgcctttctcctgttacaagtttctatcagttcttacatgtgacagaggcaatgtcagcattaagtgttatgataaatctttccgccaaaagcttcccgagtcctactgccacgtgggcggtctccgccagccacccaagttctgcctgccatgtggatggacaaaataatacacagacttctattaggtacaaatgctgcttggccaatgactaagattctcatctgttagctcagtcttaattatcataaatctatatattttataaaacttatcttatcagacaccttccattggtgtccctccttgccagtgagttacattgtgccgctggaggaagagcagaggggaaaaaggaggccacttcctgtttctccttgcttaaatatgagtctccttgctatgtcacttcctgcctggatcaccacttctctactacattcccagaatcctctttgactcctagtcccatctaacttgctgccattggccaaacaggactttattcaacaagcaataagataaacatacacagaagtacgttcccgatcaattaggtctaacccctccaacatatttttcttttttaactaattattaggcaacatacaaaagtttattatgacatttttatacatatagcattaacattgttctttttcaattaaagtttttcttatattttgatcacctgactcatttaccaactcttcctaatcatctctccacccatataacttcatattctttctctatcatctatctcttgctcaaaacacacacacacacacacacacacacacacacacacacacacactataacaacaacaaaaaaacaagacaaagcaaaaatgtacaaaaaaaaaaacatggggtttgttttgtgttggctaactacatctgggcatgggcactaccttaaagtgttgatgatataaccagtgacaagtgacattccattggagaaaactgattttccttttgccagtggatatcagttgcagataacttcttggttagtggtgggagccagtgtccaactccccctctctatgctaggaccgtatttcattgaacctatgcaggtcttgtgcctgataccacagtatttatgagttcatatgtgcatcagtcctgttgtgcctggaagacattgtttccttggagtcactcatcacctctggatctttcaatcttcccacctcctcttctgcatggatccctgaggtttgagggaaggggtttgaaaaagacatcccatgtatgaaatcccatctgtgctgtaccagtaagtctcgaaggtgagtgctgttgtcggttgcagggtttgtagctgagttatattgatgatgacttgtctcaactgacaacacgcagagtatcttccacaacctttttcaatagaggggaatgaagcttctagttgagtgcttcaaaatctctcattctctgcatattgtccagttataggtttctgtgttaatgcaatctactgcaaaaagaaaattctttgatgagggttgagcaaggcatcgatctaagtataccagtatgtcattaggagtcattttattgttattttacattagcagaataatagtagaaagttttccccttaggatataggatccatgatctatgtagcctctggttcttagccactttagcagtttcagttacgggttccatctaatggagcaggatttaaatccaatttaaaacatgcttggttattcccataatatctgtggcacattgcaatatacctttaaggtgtgtgctattgtaggttgcaggttttgtagctaagtgacattgatgtttacctgttgcctctgacaacatgcagaacatcttccacaaccccagtcaatagaggtgaagcctctagtcgggcaccagcttgagttctctgtgttctgtgatgtcttcacaacagggccttgccatcagattgtggagagcaaccaatagacttggcaaaagcctgtgatgttttgtgggtccatggggccccttcagctaatgactcaacaaaatgtaacccattactggcattagagactctacttagtgacataagaagtctaattgggacattgtgttgccagttgttcgctaacccatttaaattcctttcttatatgtatatattgtaggaaagttctatagttgtagatttcaatatgatttttccaaacatctttatagcagttttccttcccaatattccctcctttactatgttctcttgtcccctttccaatttaatcttctttttctagttcccctttatctctctgtagcactacattctatcctcctttccttagtgggtcctttcctccctcccatctctttctaggtaccaaagctctgtggttgtttggattgtatcactcatatcaaaatcttaaaagctaacacccacatataagataaaagtttgtcttttagggtcttacatgtcccttccatgtccctcttctatctgcctcccctttcttcttcatcttcctctctttgtgtattagatgtgttcatctcctcttattgtctcatttctactttcacagcttgcacacacacacacacacacacacacacacaactttaaaatcaattttgtgtttgagaaaagaaacatactgtttgtctttctggatctgtcttaactcacttagtataatgatctccagctccatccatttttatacaaatgtataatcctattcttaatatctaagtaaaattctatgacatatgtatcatattttttcattcaactatagatgtatttctaggctggttctatatcttggctactgtgaatactgcagcagtagatgtacaagtatttctgtagtattctgtcttatattctttaagggatatacccaggaatgatgtaactgagtcatatggttctattttcattgttttagaaaaactctacacttattcataattatatgatgccataagtcacatcaggtaactttctctccaacaatgtgtaagggtttcctttctccaaatccttgctagattttatccaatattttcttgtatctttaatcaaaatttcaaccatatggaaatgttgcaggtatcacacaagagacccctgcacaaccttttcccagattcacaagttgtttacattttgtttcacttgcctcatcagctgacatctaaattatattagagtaagaaacattgtgttcctcattcctaaatatatcagtgtctgcttcctaagggaaaggaaattatcttatataacataatcaaaatttaaatatattaaggacattgtctcatcttaaacgctgtcaggaaacaaaataatatgtagagcttggtaatccacattacagcaggggactttggtaggtcagtggaagaattcaccctttaggccttttattctaaaaggaaaacaaatatatttagtacgctgtaaggagtgaagcaggcacagcaataagaagaaccaaatgggagatacggccctgggctacaggggtctccattctggagaagtcttcactcattgggctgaaccagtgtctgtatcccattcctggaaggatataacattactatgaaaatgaaggtgggtctgtaacatcaggttacagctaactatgttgacctcaccattctgatgttttgctattttgccagatagaactgtggtttttgtggggtggggtggggtggggcttattttttgtaacaagcttgtattgagaagctgttttactcctgctgtctgaataatggccttccttttgcacatgtcacagctccggtgcttcccttctgctctgaaaagaaccttgcttcttgtcttgttcccagtgaccttgttactgtatctttcagggaagacagaacaccagagccagagacccttgccctgccttacacctcattatctcccattctcccgcctgatcaagagcattgttctaaagcagctagcctctaggaagtgaccgattgcccaatacaaacacccatccctttcaaaaccctgcaatcttcatctctaattccttccatgacccaaataatcactcttactttgctttgatcatagctcatctatcttccctgataaaattgtaccttatccttcttctcattttgtgttttctcagacttacagagaagctaaagtacagtggctttttctagctactaaagagtaagttgcaaatacaggactcattgctctcaaatacttcattttccctacaaagacattctctgagaacacaaagtactcccccaaacaaaggaatgaacactgtaattccttactatcatataaacatcatctcataatcaaggttttccggagtgtgaccatctgaatcttagtcacggaagagtcaaattctgaattattcagactgaaactttgcatttactattttcttctcttgtcaatcaatctcagtctggaaaagggttcccttttgtttgtttgtttgtttgttgtttttcactacttggagacttccaaagattatatatcagtgattgacttaaatagcctcaaattttggattttctagagttttctcatggttacatttgggtttgtgtttgtgtttgtggataaggcaattctttctttgttgaatttttcctctttgttgttttcagtgctaagaatgaaagtcagggccttgagcatgctgggcagttcctctaccactgaactatactctcagtcttgcttttctttctttttaattgaaaatagatttttaatacaatatattctgattatggttttccatttcccctcctcccactcctcagacgtcctccccatatccctaccaatccaaatcacaccctttctttctctctcttccattaggatacaaacaggcatcaaaacaacaacaaaaaaaaaaacagccttgcttttctgctacagagtcttagtagatgaggcagtctggcttccaatttgccatgtcttgcctcagccttctgagtgttagaatgacatggacatgccagcttccaggcctctgaattaacctactttcaatgatgttcaatcactttattgaaagagtagaaaccaagattctctgtgtttttaatcacttatttgttattttggattgatagccttttgtacttcatcacgctttttattactcatttgccatattatagatttttaatatgttattttattcaatggcttgtaattactttcattatttatactgtcattcaaattctctcaaatttgctgcaggtggtgccctttaagttatctttggttcagttttgacgggtcttcattactataatcaaacgagaaacacaaatcaaagtcacggtggagtatcacccgtttgagtggctactttcaaaattaataaaaaaatggatgtatagaaattggaatccttgtacatattgatagaaatgtaaaataatgaagctgttaaaaaaacagcaaggcatttcaacaaaagcatttcaaatgctcactagccttggagggggggcacgtggactggaataaaacagtgtcttctgagaatgacaggactgccatactcatgaactgtcattgcctgtatagggctgcatagatcaatccagttgacactttatcatgggttggaaggggttcataagtccatgcccctaattgaggagatatgaacagtggagggagagtcagttttctttgtgggtgtggctcctggcagactctaccctagtagatagccctacacccagaagcataggcacatcacaaactggagctgataggatactaaacaaaaacaaaagagatcacaaattgggggaataatgaggtgggaaagatcttggtggagttaagtggtggtatttggtgtgaatttacccaacacccagaagtatactgacagcacaaattggatccaatgtgtattacattttttaaaaaatgttcttcaatttaaaagggaattcccacatgatctgagagttctatttctgggcctaccaaaagagttgaagtcaggatcttggaaggaccatagcaccacatattgtgaataacattgctgttattcacaatagccaagatatgaaaatattctcaatggtcctaaaagggtgaatgaataaagaaaatgttatctgtatgcacaatagaacagatgcaaagaagtagacaataactgatgttccctccacaggcgtgcagttctgattatatatgatgaatatattctaaatatctatgaacatcattctgccttagtaaacaatgcaatgctctattggctattaaaaagtatgtcaagtatacaaaccacaataaagaacaaatctctctctccctgattgaaagaaaatgccaatatatagttttctattactcaaatccccaaattatttactcaccctctagtatttatgaagcaaatttataggcagtagatgaaataaagaaaaagagaaaatactttaagagtttttacttggaagggtatttagatgaagtcatctaattgacatacattaatatcaaataactgatatacattaacaaaaggttgttgtgggaattcattcagtcaatagtctctgagccctgccctgaaggggctgatacctcaaagactattgactgacgaattcccacaacaaaaagatatatatatatatatatatatatatatatatatatatatatatattacatataaagacaaaataatgaaattactttaaaaaggtgacataacattaataatggttttaagcacttgctatttattcacagaagactggactaaaaatatttagtatgcatttaactattcaccagaatcctgcttcacatatgaggaacaataggttcaaaaggttgaatgttttatgaagcttgcatattgggaaaatgagaggatcataattggaacacagatttgtctgactccaaaacatttgcacttcatcaccatggcattctggagatggaaacaccccatcttagatcagaagacactccatgaagcagatggcatgtgagattgacttttaagaatcacccaagctttgaaatcagagatatgtctgaaaactattttagctataaagtgagtcaaagtacataaagggaaagccctgaggtgtgttaagaggacccacaagaaggagaaagaccaatagattgagagaaatagcaagagaggtgggaggaaatgaatggttatagatctcaggctactgagtctatatttgacgtaaggggcaaagtatagtctaagcagagttccaactctgtagacacctccctcagactttcagcaggatgacatcagttaagatctgaccagctctgatgattcataaaatgaatggcagttactaaacctgaggagaggaacccattcaagcagtttgggaagtggggtgaacagggaatgcagttcttgccagaaaagggaaagaaatgggagtgatcaaggagaatgtatccatggagacatgaagagcatttaactctgcagagaagagggattctcacaaagctcccagatgaacatcagtgagttgaccatttctaagtctgaagacagattacaggctcatcactgagaatgacaagatttgcctaaaggctactagcagtcccctgacccagaacattcctgtgaagctgggagtcctctttagacatttatggccaagctttgggttgatgggaaggctccgaagcaggtatactatataaaagctcatccaaagattattttagtgtggaaaaaattccttagacaggtttgattacagccagtcctttatgagaaaaatagggaatgtgtccatgtgggactatgtgctgttgctggaaaagatcatgtttacttatcagggtctacttcaaacccaataacatgaatttggtgttgaaatattagaggcaggattatctagtcaccatgacccataagtggggttgaagttgtactcaagtaggacaaaatttctgggaagaaaaatcactaataagatatacttactttgaagatgatactttgagccctgtagataaggcctgatgttttcttttaatttcccatttattgaattactggattcatagtaaaaaaaatacagtgtctcctaatatttgctcattacttttcattgtccagagcatctcttcagcagtcctgttttctaaagatagaatattgggtcttaaccaaaacaattgaagccaaagaaaccactggtaagggcttcagtcataataaaattcagggaagctagacattccagaaatggatgatggagcccactgccttttgggctacaaagctttcctaagtgctgaaggagaactatagtatgtgtttcttcaggtcctatcagcttcaccaccaagtgagaagagagaaggtagtgaatccatagtcagacaggtgtctggtgaagagagagtagagggtcagtcagaggtgtgtgtcctatcccttacctacatcagtctgagaactgtctaatcaaagtgaatttgaacttgatttatatcagagacctggaaattcagcttaacttataatttgtttctaggaagttctacagacctgagaggacttcacatagcagacaggatgaaagctaatatgcctgttataagagccaccaggtaagaaaaacaggaggacatcgagagcaatagaggacttttatgttagtcactttgtgtcactatgacaaaacaccaaaagcaggagtagtggtggaatgtaaggtagaaaggcttgattttaaccagctttggtgatttcagtacatggttggctggccccattactttgaggcttaagatgagatagaatattgtggcagcaagcacatcctggaacacgtaggtgattgcctcacgttggctggaaagcggagaaagacagaaggggtttcaagataaggcacatccttcagaggaatattcccaaggatatactaggaactcatccactaatgagtactaacccactaatgattccagcacctttatgatccagtcacttcttaatagtgccaccatctgtggttcaagcctttaatatgagcctttataggatacttcatatccaaaccacgtaatactctacatcttgtctccaaaaatcataacgtatcaattatcataatgaataatacatttagtctcaatagttctggcatttctcaaaaacccaaagcctcctctgcgactcaaggcaaacacaaagttaactgtgagttcctgtaaaatcaaatataaatataaacaattgcacaccataaatgttatcattctaaaaataaggactaggtcaaagaaaaagggtaggactaatgcaagacaaatcccatgaaagaaaacattaaatcttaccactctatgtctggaatcaggaggacttggtagaataatgtgagctcctaggaccttactgcctacaaaccacatggcctctctcttaggctggctcttctcactgcctttggtttttctttgtagatggcccacagtctcagcaatatctggtgtccattgtggcttgaattttgccctctcagcttcatacatcaccttctctagaaattgcccacagagaatccagactactaagtattgattgaatttctggttttcattttaaatccctgagggaacttccatgagcctgtgactatggcactccacatgactgcacaatcagcattgcatggacactggtcaagttctgcctcccgcttgaacttggatcacagttgtggtgagccccatgtgtctgagtacactgaaatgaattctgatggaacaacattctagtaagaagcaggatgtccaggagtcccctcttctacaaaacatctttcaaagaagtttccacttacacacagataaggtcttggcaattactgcaataccttcaagacatctttcctattgtctcagtgcattgtatgtttctctcgtcatttctttcctttcttaattttttatgtctgaagagatgaatattcttcaaaagcatacctctgttgaattacttcctctaagtattctctattttcagcaagctatgaattcaacaatggctcaatccattcgggaatatggggaaatgggagacagtaaccaattattccaaagatgatcttcagaaaggatgacttaaaaaaaccagttcatcacaggagagaaacatatgaacagttttatcagttgagaagtagtatatggagaagaccaaagagttgggagaccactcagccctataacagacactccctgctttaagctatggaaatacatgtaggaaagtatgactctaaagtattgtggctaaatggttttttacattcccatgtttcatgaaatataaaatttctttgaactggatcataaaacttaatactatataaccattttattcattcatttatctaatcaactagaatttatttcaatatttaccaggctccatactaggcacagaaatcatgaggctgagcaaaactaatgagtcctggtcaaaagagttttgaaactgaaacaaatataagtcaacattaagcaatggcctactgtttaaaagaatggcttattagttattattcctctccaatttttagttaatccaacaccctcccaagctctctttctagactagaggaaaaccttctttttcagaagtgttaaccatcattgggaatatttgtcactcaaagacatactgagcttttcctcatcaaatccatagtgttaactgaaatagagtgctggtgaccttcccagggtgcttcctataattgtcagatgcatcagcagtggtgtcaaatgaggggaaaatcttaactagggagagcactcatgccactaaaaatttattagtggaaaaaatcaaagatcttgacagaaattcaaagtcagagaccatgataatttctgggtcgtctggttatcctgatgtctatgaagaggtgggttatgatagacatagtccaagtcctagggtaaaagcccagcgagcagagcaagagtaaataaatgccttctgatggaaacaatgtgctgcactcagatctcccttcggtgttgctagtgatcataacaccaagcctctcatctgaccctctaccatattcatgaaggaactgaattggggttactcagagaagatccttctgtgcatcctactgagaaattttccagggcaaaatcacatgtggtgatattctaccccattccaccaaatctcacaagtttagagaaatttcatataggcccttaaatctatcgtctacattgagttaggaaggaaattactaactttggagtctaacagtcaactttttagatttttcaaagagatgtcacaacattgaactataaagagaaaacagacctgggtgacttaattcagtaacttgatgggtctcattggattataaattggcttctttcagtttcagagttttctattaacctcccaagttatataactaggacacaccacaaaaagttagtactatatttgtagtcaaaatgttcaaatagcaacaattctatatagtcccatctagtaggcaccctgagaaaccatctcacagtcagaacagtacaatatatctagagaaaagttatagctgtaggagtcagagtagacagataaggtgcagatgatatatttcaagaggagataaacccttccagtggaaacagactatgtttcattgatctctttctccagtgtagtcttttggatatcatcctccatggatagattggaggaaaggatggaaaggagaagggggagagatgacaatgaagttggtagagagagaaaaagggggacaaaggagaaaaaacggacggaagagtcataaaaagaaggaaagaggaagggcaggaatggaagagtgctatatcaatttataatggtgcccatgtctttattagtgtacattagttatatgtgatggatttcatcatgacactttcatacacatctataatataattctatcatttccccatgactctctcttgtttcccttcctcttttgcaattctttcctctcctcaactagatcctcttctagcttaatgttttttttttttaaataactcaatgagtttctttagagttgcttatgaaagtgtgtgtgaagggttgtttacaggaacttgagcattttccctgtggctttatcattatcactaaaggaaatgtctctcacggggctagagtcaaagctccactattaagagcactgactaagctgggcattggtggcacaagcctttaatcccagcactggggaggcagaggcaggcggatctctgtgagttcaatgccagcctggtctacacagtgagctccaagacagcctccaaagcaatacagagaaaccctatctcaaaaaaaaaaaaaaaaagaaataaataaaaagagcactgactgcttttccagaggactgaggttagattcccagcatccacaaggcagctcacaaccatctttaactttagtttcagggactgggtgctttcttctggcttccagggccacgccccgggcacacaactggtgtacagaaatacatataggcaaaatacctacacacataaaataataatgaacataaaatatttaaaaagaaaaaatgtctctctgatacacacatccatcaataactatatgaatcttaacagaagggtggggctccatgacaaaacatcaagcaacacaaatcttttatgtagataatcagagctgctgtgagttcagtgcagattttttagcttctaatacttaaattcagttagcatacagtaacaagattttattttctgcctcaaatagcatgaagttccgagtcaaaaattgctggtctccatctaaaacatgctggttcatagggtaaaaaatggcttcagcattatgttcacattcaatgaaggaagagggaagaggcaggaccagaaatttctgcctctcttttctttcagaacagaaaagcctgaagccctccttactctgtgaagaaatctatgataccttgctagccaaagctgtgctgcatgagcatttacatgagaaagatgctgaggtgatgccaatttcacaatagcagtgctaagtttctgagaaacacatttcagtcttcagtgaccagctctgtgactcttcagagctgttgggagtgagggagttgggtcctgggtttggttgctttctgtgttactgctgaaagatatctgccttctgcttcctgcgtttctgcatctctttaaagggaatgctacaggtccccagtggggtccggatccctctcccctctaacatttacagagacagagcaccctggtgggccaattcaacaatcttgttctctgagttattcttgaagaaacagcctatagcctgctcctgcaggccttggtggttttgcaaacacttaattacatctttcaaatgtctttctgtttacaacagctagcatggtttttgctttctgaaccaaggctctagctggtgcacaagccagtgttttgccacaggtagtcaggtggaaagcaagctctgcagggcctcagcctctgcccaggcttgtcaagaaaaaaactaacaagaactaatttcctcagcttccccgagctcgcacaagtgaacacatatttacttcccaggcacagctttagtcacacagatctgaacctttggaagtgtccatgcttctgacattactgctctcctgaacaaatgacacttgttgtgcatcctaaggtttcagtgtcctgctctctttagttttctttccattgaacaaaatgatttcaagaatcatacttggatgcatgaatgcatctcagggtattcattttccaggatttataatcatttttggaagctctatgtctacagaaacacagtgtgcttgatatttgtgagtttctcctctcatagtcacctttgatgggcagagacagcaatagtagatagatagatatacagagatgccttcctgcaactacattttggctagggtcagttgtgtatgggccatgacacaaggacttgagccccaataccaccagaaaagaagctcatctttggggcaaagagatgtgtacactcaccactgtgtgcccagaaccttgaacaacaactgagatgtggtagctggctgtcaaatatcctctgaattaattaatgttcactgacacatcagtgaacactccccacataggtgccattagcatttagtcatcaagacaagtcagtgaagttgatgctctcttcactcttctctatgagtatgttagccctttttttctagacagtttgactggtggaactgctgagttaaactctggattcactgacttgcagaaatccaacagttacttatgggaaagggagtaaagatatcagctatcaaagtgggctagtacttttcttaggttcaggtcagatctctgtgtctttccttcgcatgggtatagaatgtaccacaccaagttctttttcagtgtggcctctctgtaccatcttttagagtttcctgaagaaaaagagggagggagagagggaaggaggagagagagagggaggagatagggaggagggagggagggagagaaggaggacaagaaagtgataaaaagggcttgagtaagcgcgtttgtcactaaacctatgacttgatttggatttccacaacccacatagtggaaggagagaactaactcctataaactctcctctgaccttcacacacaggccagagtgggcacacatccacacacactgaataaacaaataatgtagaaaaaaagaagaaatgcacaaggtttcctctaaattggctccgtataaaagtgtaacagcactgaaggaagttaacactgtgacttatctaggactcatttctggactaaagctcctttcaaaggttagtatctaaccttagtggtaaagtcttaaattccatttctaacacagcattgtattatttgacacgaactatcaacagattaaagaagtgagtcacccaaagcaattatccaacatgacaaccacagccaattcttaaatagtactaaaattataatgagatgaacaaaattacaatattcaagaaagtatacttcaattagatgggctttagatatcaactgggtgggtgtatgtgtgtgtgtgtttgtgtgcatgcatgcatgtgtaatattttaggagaaccccgttgccaaagaacatgcttaagtcataatagatattctctaaataccttagtagtccttgttagttatttttcttgttgctgtaacaaaacacccaacagaagtaatttaaggagaagggatctactatagctcaggatttgagataacacagtccatcataacagaaagaacacattagttgagagaagattcaacgatagtgagggcatcagacagctgttttctcacatataagtggaacaggaaggacatagtgggacatgtcagcacttgagggctgcctctcttccttttcagcctgggcctctaaatcataggatgttgttattcacatcagggtaggtcttctccctcagttaatctaccctggaagtaccctcataaacatactcaaaagtgtgtttcattaattcttcaagcaagttgatgatgttcaaaattacccattacatagtctaacacacaaatagttctaattttacacattttaaaaattagctatgtgactttctccatcattttccatgtgaacatgctataattacccaaagtttgatgggcattggtagatcaacgtcaaagaaggcagtcataagattggcagataccttagttgtttgctaaatcgtggcataaatttttagctccttaccaggtcctggtatcctcacaccaagagggattccagggcctgtgaaaaagtgagcaggaatctgcagtgcttcctattacttgtttctgacatcacactataacacttccactttttcctactcattaaaagtgattcatcaagtccaggccacactcaagggatgaaacaggccttataatcataagtggacaatgcttaggaccatcactgaggcacactttcaatttacccttccctccccagcaacaactcatttccttctgtataactatgcaatggccatttttaaatactccctgagtcagacatgttagcacatacctgtaatcctagcacgcaggaagcagaggcaggatgagcactgccaagttaaaaggtagcctagactacacagtgaattccaggccagaaagagctatgtagttagaccttatatttttaaagtccccatgttttaaaacaaagcatacaaagatcagtaaataattaatgcttcccccaaaaaagtaccaagccctgattgttttacacatgattttaataaaacaagtatttcacaaaaagaatgtactgatgattgcctgcaatctgttccagataatagagaaaaaacattccccttccaatctttgaatgtacctaaccctaataccaaattcatattggaacatcataagagagaaacatgaaagaacaatttgtctaatacatacatacatatgtatattcaggagaaagaagtatgtgacttagaaggaattattatctttgctactgtgacatgtgacactgtgtatttgtcagaactcttagaagtatgagacacaaagaaggcatcctgatgtggaaatgctcttcacgtattgataacatgatagagtaatgcaaggaactgatagtaggaaactctgtgccatcagatcagtttgtgaaataaaaacctctccacaaatacatcttagtaactctcaaaactatatcatcagttaataaagttctaagtgcattactaaaatctgcatggtctatcttactggagaatgtccaaacctgcagcagctatatgactactcctcctgactcctctttgcctcccctccccggcattctccttgtctggtctccccacctatacttcctgcctggatactggacgatcaatgttttattcatcaaccaataagagaaacagatatacagaaggacattcccgcatcatgtacctcccccaactcagtcttcttgatcccttagggtcccaccctccatcccctcccttctacccatcccagcttacccaggagatcttaactctttccccttcctagggtccccttacagtccccttgttacctagcttctctggggttgtggaccgtagcctggttatcctttgctttatatctaatatccacttatgagtgaatgcataccatgtttgcctttctgggtctggtttacctcactcagagtgtttttgttctagttccatctatttgcctgcaaatttcaagatgtcattggttttcaccgctgagtaatactccattttatatgtttccatgttccaaatattatactggattccatatgtaaaattgactcacccaaactctgaagcagagctaagtgtatagctcaggggtgaagcaccctcctagcatgagcaaggtcttggtttccaccagctgatcgacaaacaaaaccatcttttcagtgtcacaagcatttaatggatatatactacagttattagaagatagcagataagcacttagatgctgagaatttatatacctgtggaggggatcacttggaaatggcaggcatagaacagaggtcagcaatctagggtaactctccatgggcttcatctctaccatacactgacaactggaaaattgtaataaaatatcttatattcagaaacaataaagcattgcacctaccatttgataaccccccatttgaaatctgaatggtgacttatccccttccctggactctccatcatagactccagcaaccactcttgctgtccaagaactgcaacactgtcttccagttgaagcgtctgtggtgtgcattcactgaaagtcatgaatgccattgtcctgaaggcattaaatgcagcagtcataaatatgaagtaacatttctttttttgttttgttttggtttggtttggtttttcgagacagggtttctctgtggctttggaggctgtcctggaactagctcttgtagaccaggctggtctcaaactcacagagatccgcttgcttctgcctcccgagtactgggattaaaggtgtgcgccaccaacgcccggcatgaagtaacatttcttattgtttatccctgttactgtaacctcacaacacagggatggccatgagaaagtggtgctctggatataccaaacagcacagtgagccagtagactcttaactgtgactgctcacagtgtttggtttgtgtacaatgttgcatccaaattcccaccctcagctgtccacagttctgcttcaatctttcttttttccaaaaaaaaaaaaaacctcgccaggcgttggtgccgcacgcccagcacttgagaggcagaggcagaagggtctctgtgagttcgaggccagcctggtttccagaggaagtgccaggataggctctaaagctacaaagctacacagagaaaccctgtctagagaaaccctgtctcgaaaaaccaaaacccagtacctgatctgactttttagtttctagaaggtcagtctacctacttcagatttgctattcctatcctacttaggaagctctctctctctctctctctctctctctctctctctctctctgtgtgtgtgtgtgtgtgtgtgtgtgtgtgtgtgtgtgtgtgtgtctgtctgtctgcctgtctgtctgtctatctcctgtcctctcttctccaagacagagatccccttcctgaccaagataactctccttgcagccagcagaatatcccaaaacaaggtgcttgtttttagcaccttctagagcaaagaataaaagtttccatcaatgaaaatgaggggtaatggtctcttcactgtagctggagtttttatgtgtcccacccagtcccacaaccatttataaaatattcattcagagacttaatattaattataattgtttgactaatggctcaggcttcttattggctatatcttacatttaaattaacccatttctaatcatctgtatattggcacatgccttgtggcttaccagtaatgttctgatatcttactcctctggaggctacatggcgtctcctcgactccacattcttcctgtccttatctctgtttggatttcctgcctagctatattctgcctgggtattggccaaatcagcttctttattaaccaatggtaataaaacatattcagaacatacagaggggcatcccacatcactttacaaggtacaagatgtagtaaatagaattttcctaccattcattttaaaaacaaaaatcattattatccaccttatcatttagtaggatagagaatcagatttttgtgccagaagcatggggctagtccttcaacaatttaagaagtaacctcctggcccagaattacactttccagacccttttcttttaagcatagacccagggattgttcctaccaaaagtatgtgtgcagaaataccatgcacaacttccaggccaccatggtaaaccccaggggagtttttcatgattgccttttgcttgtcttcacctgcaggcagagccttcctcagaaggctgtgaagctctggaaatagcagagccatatgatgcaagatccttgaaatgtgacttggaggagagcctcctgacaatcaggaacatgcaattgtattttaaacaagacaaaaataatttctcatgatgttaagtcatgagatgtttttatagattattactttaaccattctgaatacttgtgctgtttctcttcatttttggtttgttcttagccttttggcaaagtaaagttgcctaaaaacagatctaccacacaagatagatgattggtaagtatgtatattggttagttttgccaacttaaaaagattataattacctggaaagacagaatctcagtatcctcaattgtttccatcagatttttcagtattcatatctgtgaggtatttctttaactgttagttgatggagagggcacagccacttcgggtgttactatctgtaggcaggtgacctttagctatatttaaaagaaaaaaaaaggtagctgaagcaagctagagcaaatcagtaagtcacattcttccacggtttctgcatcagttcctaccttcaggttttgcttgtgttcctgccatgacttctcttaataatgaagtatgacatggaaatacaaagccaagtaggccctttcctacccaagtttgtttgatgtttatcacagcaacacaaagcaaatcaacacaaagcaaatgctgagcaaatacaaaattctcagagttctcaaatatattacatctccagaaaccttttaatttaaatgcccattcaactagaaggcaaacttataaagattgcagtatcaaaataatagtatctattttgaaaccctcaggtctttttcttcctgtcccccgaccacaccatctgatctgtttctgctgctactgcgaggtactacctttggaaagccatggttgttcccccaaagaaaattttgcttattaaactgcctgtaatcccccacttagttctattagcagacaaatcaacctgattgattctgtctcagaactgccttgatccccaccatttggttatccccaccaaaatttgagatcagcctcttttctcttcacctatagattttgataaagaaaatggacttgaagaacacaaaagtagaagaagcaccatgacatattctaggaacaagcctgaaataactgaaggaggaagaaacttcaaagttgtagcacagcttcttatgtactgaccttgacttttcttatactgactctagttagccattttatgtctggtttctcacttctcttgtacattccactacctcaaaaacattctcctataccaacaagtatgaagtccaatatgtattatgtggtataaagtactctgttatattgcaattattaaacattgttagtatacatatcagtttctgattctctgtagacactatcttcggtgtctattcttcctctgtcaaaagacaagttttattcatattttcaaatccaggaaaaatgttgcttcttgaaacctccaatcactcttcatatctatctatactgatggttattaccctttgttaactgcatttccaaaattctgtgattactatctgcataacactggcctattggggaaaataactagattactgtctctctaagaagtactagggagacattgtttctgtatttctagtgctagcccccagcacctgacactgaaatagtgaatgtgatatttttattgaaacaagtcaatatactacaaaggctttagcaaaatcacaaaatgaaacacaaaagctcggggaatggcaaggcaagcagctcagcaaaagaaaaatctcttgaataaacatttcttcaactggaaaaattattaatgacaattattccaagcttctggaggttgccaagagtacttgtagtgtttttttttttaaatcaaactctctaaatgcttaaataaggacaaatttggggaaaacagaaaactgtgacattttgcatagttctgtacccacccctctcccactccactctgcattatagaagacctattgctggtggaaatgacagcaggagaaacagatttcttctccatcagcttagttgtgcatccaacctaatcaagtagagtagaagtcatgcatatccccactcagttcctgcaccacaggaaatttcgcatgtgccagttaatggagagcaaactccattcctaccacccttatttccagctccatacaataagcaggcattccctatgaacacaccagttgagtaggctagtaaaataggcaacacacagccaatacacttctaaaatccaaggaaacagaaaccaaagaacaaaacacctgcccaactaagacaaacccagaaacctgcagccagacctataatcaccccaaacccatcatagatgccagcataagaacacaatcaataacagccaggataatgtctccattagagccctaccacaacaggcccttattataaaaacatagctgaagcgtaagacaaagaccttaaaaccacctacttgaagatgatagaggtacttaaagaggaaatgaattaatcctttaaagaaagtcaagaaaaaccaaaataaagtgtaatgaaatgaatagaagtgttcaagaactgaaaatggaaatataagcaataaaaacacacactaggggaattctgtaaataaaaaaaaatgtaggaatttgaacagaacctacagaggcaagatttaccaataaaatgcaagagttagaagagataatatcaaacattaaagatatgatagcctaaaaattttttaaaaagaaaattttcctaacctaaaggagatgcctgaaaaggcacaagaaatataaagaacaccaaatagattagactaaaaagaaattaccccaccacataataatcaaaacactaaacataaagaacaaagaaagaatattaaaagctacaatggaaaaagattaagtaacatacaaaggtcagcttactagaattacatctgacttctcaatggagactaaaaaccagaatgacctacacatatggactgcagactcttagattccacagatgcaagcctagactactgtaccagcaaaacttttgatcaccatagatggagaaaaaaggatattccctgatttaaacttatctatctacaaatccagccctacagaaggttctagaaggaaaactccagcaaaaccaaaggaaagaatcacacacacacataacaaaaacaataccgaaataacaggaatcaacaatcattgaccattggtatctctcaacatcagtgctctaaattccccgaaaaggatacatactaacagaatgtacacaaatacaggatccatccttctgctgcacccaagaaatacacttgaacatcaaggataaacattaccttagggtaaaagtctgaaaaaaatattccaagcaaatggatctgagaagcaagctggtgtagccatcttaatatctaacataatagctttcaaaacaaaactaaacaaaagagatagggatggatacttcatactcatcaaaggaaagatccaccaagatgatatttcagttcttaacatatatgcctcaaacacaaggcacccacccttgtaaaagaaacactactacagcttaaatcacatattgaccctcacactgcgggagacttcactacccaactcccagcaatggacagatcattcagacaaaaactaaacagagaaatggacattataaaaccaaaatgaacctaacagatattcacagaatattctacccaaacacaaacgaatatgccttcctctaagaaactcatggaactttctccaaaatttaccacataattagccacaaagcaactctccagatatacaaggaaattgaaataattccccacatcctatcatattacaatggattaaaactggacaccaacaaaaaacacaaacaacaaaaaacctacaatttcatagaaattgagcaactctctaccaaatgaaaaaattgatcaagacagaaataaagaaataaattaaagactttctagaattcagttaaaatggagtagatggcgagggattaaactgagagctgaaatcaataaaatagaaacaaagagaagaattcatagagtcaatgcaacaaagagtttgttctttgaaaaacacaagatagacaaatacttatcctaaccaatcaagagactgagagaaactatccaaattaacaaaatcagaaacaaaagtgggcatatagcaacagacactgaggaatccagagaatcataagcatacaccttaaaaacctgaaatccaccactctgggaaatataaaagaaaaatggattttttcaataaatcaagagcaggtaaatagtttaaatagatactaacaaaaagttataggccaatctcactaatgaatgtagtagatgcaaaaattatcaacaagttctacgaaccaagttcaagaactcatcaaaaatatcgtctgccatgttcaaattggcttcataccagaaatacaaggatcgtttaacatatgtaaatcaataaatgtaatccacaacataaacacattgaaggacagaagccataccatcatcttattagatgtagaaaggccatcaacaaaatccaacattccttcataataaaagtcctatatagctgatatatccatttcaacataagaaagggaaaatatagcaagatcacagcaaatacctgctaaatacctgctaatacatgctaaatggagggaggaagcattttcactaaaatcaggaacaagaaaagtttgttctcaccctccattcctgtttagtgtttgaagtcttagctagaacaatcaggcaaatgagggagatgaaggaaatataaataggaaaagaagtcaaagtacgttaatttgtagactttctgattctatatgcaaaaacaccataaaaactgccaggaaattcctaaagttgataaacacattcaagttggatacaaaatcaatatacatgaagggccagaaagatttaagaaccagaggaccaggacatctgctatgagacagtgccttctatatgtgataggcatgatacactcatgaaatttgaacaatatggttggttgcctaaataaggtatacacaatgacattagttggcatgcccaacatgagtctgatgaatctcacaaagctccatctctagatgagaaaccactttgagatcttcctacctctcccttttactccaatacaatattccaataaagacagttggtgaatggtcaaaaaatagtcttcctatatacatacataataagagaaatcaaagaaacaatcccattcacaatagcttcaagaaaaggttaaaatgtctagggataaatctaaccaaggaggtgatttgtacaacaaatttaagatgctaaaagaagaaattgcataatatgctagaagacaaaaagagctctcatgctctggtagcattcagacgatgatatggccatccttctgaaagcaatccacaaattcaatgcaatcttccataaactcatgaggtaattaatcacagaaagtaaaaaattaatcttagcttccttccccctcctctgccaacctgacccctaccaaggagagtgtaccctctgctcctgccctactcctacccaatatcccattcaccccgatctctctgggcctgcatctgcttatagtggacccacccagaaagggaggagctccctgagtctggaaacacctcactcttcgttccccttttgctggcttgacccctaccaagcctgatgcctaccaagtgagcagactaccaggagaggcaagaccatccagagctgcagacattgaagtcttggaccacacacaccaccgggtgacaagaggagatacagagaccccacttgcacccactggaagaagagatgggaagaagacaaaatatgaacacactcaacaacagaaaggccaatatgacaccaccagaatctaaagactccacaccagcaagaggtgaaaagctcaacacagaggatgaaaaagacatggaactcaaaaattatcttaggaagatgatagagacctttaaagaggaaacaagaaaatcccttaaataaatagaagaaaacaagcaaaaaattacatgaaatggaggaaaaggaaaactaaaaaattcaagaaataaacaaatctcttaaagaatctaaagcaaaccaagaaaaaacaaccaaacaagtgaaggaagcacttgaaacagttcaaggcatgaaaaatgaaatagaaaaaataaagaaaacacagaatgaggggatgctggaaatacaaaggctggataaacaatcaggaactaaagatgtgagtataaccaatagaatcaagagatggaagagtgaacctcagttggtgaagactcgctagaggatatacagtcatcgaccaaagaaaatctcaagtccaacaaatccctaacacaaaatacccaagaaatatgggataccgtgaaaagaccaaacctaagaatagtagttatagaagaaggggaagaaatacagctcaaaggtacagaaaacatattcaacaatatcatagaagaaaacttccccaaactacagaaggatatgcctatgaaagtacaagaagcttacagaacaccaaacagactggaccacataaagaagtcccctcaacacataataatcaaaacaccaaacttacagaataaagagaaaatattaagaccacagaggaaaaaggccaactaacatataaaggcagacctatcagaatcacacccaacttctcaatggaaactttgaaagccagaaggtcctgcatagatatcctacaaacactaagggagcatggatgccaacccagactactgtacccagcaaaactttcaatcaccatagatggagaaaacaagatattccatgacaaaaccatacttaaacaatacatatccacaaatccagcactacagaaagttctgaaaggaaaactccaacccaatgaagataactacactcacaaaaaacataggcaatagataatccaattttaccaaaatgaaaagaaacaagaaggcgaaaaccacacacaatgatagcaccaccaataaattcaaaacaagaagaatcaacattcaatggacattaatatccctcaatgtcaatggtcttaacctgcctataaaaagatacaggctaacagaatgaatatgaagacaaaatccatccttctgctgattacaagaaacacacctcaacttcaaagacaggggttacctcagagtaaagggttgggaaaagattttccaatcaaaggggcccaagaaacaagctggtgtagcaatcctaatatctaacaaattagacttcaaagtaaaatcaatcaaaagagatgaagaagggcatttcatactcatcacaggaaaagtccatcaagatgaaatctcaatcctgaacatctatgccccaaataggaaggcacccacatatgtaaaagaaacattactaaagctcaagccacacataaaaccacacacacctatagtaggagatttcaacaccctgctttcaccactagacaggaccaccagacagaaacttaaaaaagaaacaaaggatctaacagaagttatgacccaactgggtttaacagatatctacagaacattccatcgaatacaaaagaatataccttcttctcagggccacatggaaccttctcacatattgaacacttatttggcaacaaagcaaacctccacatgtacaaaagaattgaaataaccccctgtatcttatcacatcaccatgctttaaagctagaattcaacagcaatacaaattgcagaaaacctgcaaactcatggaaattgaataacacccaattgcaccattcctgggttgaggaagaaataaaaaaagaaattaaagacttcctaaaatttaatgagaatgcagacacaacatacctaaacttatgagacactctgaaagcagtgctaagaggaaagttcatagcactaagtgtccccatgaagaaactggagaatagtcacacgagagaattgacagaacaactgaaaattttagaggaaaaagaagcaaactcaccacagaggagtagacaccaggaaataatcaaactgagggctgaaatcaataaaatagaaactaggaaaacattacaaagaatcaatgaaacaaagagttggttctttgagatcaacaagatagacaaacctctacccaaactaaccaaaagacagagtgagagagcacgctaattaacaaaatcagaaatgaaaagggggatataacaacagacactgaggaaagccagagaatcatcaggtcatactttgaaagcctgtactccacaaaatttgaaaatctaaaggaaatggacggtttcctggatagatatcactttccaaaattaaaccaagaacagataaacagttcaaatcaacctataacccctaatgaaatagaagcagtcatcaaacatctcctaaccaaacaaagcccagggccacatggcttcaatgcagaattctactagaaattcaaacaagagctgataccagtactccttaaattgttccacacaatagaagcagaagggacattgaaaaactctttttatgaggctacaatcactttgatacccaagatacataaagatacaactaaaaaagagaactacagaccactatccctcatgaatatcaatgcaaaaatactcaactaaatattggcaaatcaaatctaagaacacatcagaaaaatcatccactatgatcaagtaggcttcatcccagggatgcaaggatggttcaacatatgaaaatccatcaatgtaatccaccatataacaaactgaaaaagaaaaaccacatgatcatttcactagatgctgaaaaggccttgacaaaatccaacatcccttcatgatagagatcttggatagaacaggaataacaggaacatatctaaacatgataagagcaatatacaccaaagcaacagccaacatcaaaccaaatggagagaaagtcaaattgattcctctaaaatctggaacaagtcaaggctgtccactctctccatatcgcttcaatattgtacttgaagttctagctggagcactaagacaagaaaacgagttcaaagggatacaaattggaaagaatgaagtcaaactttcactatttgcagatgatatgatagtctacataagtgaccccaaaaactctaccagggaactcctacagctgataaacaccttcaggaaagtagcaggatacaaaattaactcaaaaaatcagtagccctactatatacagatgataaatgcaatgagaaagaaatcagagaaaggtcacccttcacaatatccacaagcaacataaaatatcttggggtaacactaaccaaaaaagtgaaagacctgtacagtaaaaactttgagtctttaaagaaagaaattaaagaagataccagaaaatggaaagatctcccatgctcttggataggtagaatcaacatagtaaaaatggccatcttgccaaaagtaatctacagattcaacacaatttgccccatcaaaatcccaacacagttcttcacagaacttgaaagaacaatactcaactctatatggaaaaacaaaaaggatcttctggaggcatcaccatccctgacttcaagctctattatagagccatagttctgaaaacagcttggtattgacacaaaaatagacagataaacaatggaatcgaattgaaaaccctgatatttacccacaagtgtataaacacctgatctttgacaaagaagtgaaatctatacaatggaaaaaagaaagcatcttcaacaaatggtgctggcacaactggattcggacatacagatgattgcagatagaaccatatctgtcaccatgaacaaaacttaagtacaaatggatcaaagatctaaatccagccacactgaatcttttagaagagaaagtgggagatacccttgaacgaactggtacaggagactgcttcctgaacattacaccagtagcacagatattgagatccacagttaataaatgtgacctcctaaaactgagaagcttctgtaaggcaaaggacacagtctgtaagacaaaacgacaacccacagaatgggaaaagatcaccatccccatatctgacagagggctgatttccaaaatatacaatgaactcaagaagctagccaccaaaacaccaaacaatgaaattaaaaattggggtgcagaactaaataaagaattctcaacagaggaatctaaaatggctgaaagacacttaagaaagtgctgaaaatgcgtggccatcagagaaatacaatgcaaaacaactctgaaataccatcttacaccagccagaatggttgaaatcaaaaagaccaatgacaatctacgctgaggaggatgtggagaaaaaggaacactcctccattgctggttggagtgcaaacttataagaccactttggaaatcagtatggctgttgctcagaaaaatgggaatcagtccacctcaagatcctctcctgggcatatacccaaataatgcaggttcatacagcaaagacatatgttcaaccatgttcatagcagcattgtttgtaatagccaggacctggaagcaacctcgatgccccgcaactgaagaatggatagagaaaatgtggtacatttatacaatggagtactactgagcagaaaaaaagcaatggaatcttgaaattcgcaggcaaatggatggaactagaagaaaccatcctgagtgaggtaacccagttacaaaaagacaaacatggtatgtactcactcatatatgaattttagatatagagcaaaggattactagcctacaatcctcttcaccaaaggaactaggaaacaagagggactctaggagaaaaatgcatggaccctggagagtgggaaggggcaggatctcctgaactaattgggggcatgagggtaggggagagggagctaccagaatgagaggaggagaagcggagggaagaagagaaaattgaggagcagaaatgttgagtttggggaagaatagaggagaacaggatgagagataccgtatcagagggagccattttaggtccgaggagagatctggcactagggagatatccagagatctacatggatgacacaaactgacaatctaggcaatggtggagaggataacctaaatgccctttccctatatggagactgatgattattttatataccatcctagagccctcatccagtggctgatggaagaagaggcagacacccacagatatacactgaactgaactctggaacctagttgcacagagggaggaatgaatatcaaaggggtcagtaccaggctggtgaaatccacagaaacatctggcctgaacaagggggagcacatcaaccccagactgttgtctgggagaccagcatgggactgatccagacccctgaacatggatgtcaatgaggaggcctccgcactctatggggcccctggtagtagatcagcatttttccctagtgtaagaagggactttgagagcccatcccacttgaagggatgctctccaggcctggacacatgggggagggtctaggcccagcccaggatgatgtggagcccccatcaagggccctaccctgccaggggagtggaggggccataggatgggggcaagtaggtggttggggggagagttggaggaggggagggagaagggattgacatgtgaagcttattcctaatttgaactaataaaaatatgaaaaatttaatcttaaatttcatatgcaaaactagaagacccagaatgttaagataatcctgaataatataaacactactggagatcacactatccctagtttcaagtaatattgcagagctctgctaatataaacagcatgatactagcctaaaaacatacagtgatcaagaatggaggatgcacatataagcccacattcttacagccatctgattttttacaaagaggccaaaaatacacatgagaaaagatagcatcttcaacaaatgttcgaacttggtagttatttatagactagaactagatccttattaataacccacataaaactcacttataaatagatcaaggacctcaacataagacccaactccctgagtctgttagagaaaaagtagggaatacactccaacgtatagacacaggaagagactttctaaacaggactccatcagcacaagcattaggatcaagaaatgaaaactggggtctcatctaactagaaagctgttggacagtaaaggatgccatcattagagtgaagaggcagcctgaatcatgggaaaaaaactttaccagccatacatctgatagaaggttggtgtctaggatacataaggaattgaaataaaactaaacatcaagaaaacaaacaactcaatttaaaattggggtatggaaataaacagagttctcaacagatgaaacacaaataactaagaggtttttttttttcaatgttcaacattattagccatcagagaaatgcaaattgaaactactttgagatttcatattgccctagtctgaaccgctgagattaaataaaatgacaacaaatgctggggtgcatgtgaggtaaagggaacacttagtcacagctagtgggcatgcaaactggtatagcctctatggaaatcatgatggaagtttctcaaaggctaaaactagatctacaatacaacccagctacactattttttgaacatttacccaatggattaggtatgctattatggagatactggctcatccatgttcatttttgctctacacatgataaccaggaaatagaaaccacttatatgcctatcaactgataaatgatgatgaaaatgtgcattgcagaatgtaatattattcagctattaagaaaaagaactttgtatgtaaatggatggtgctggaaatagtcattctgattgtggtaacccagacccagaaagacaaatatacatgatttctctcatatgtaggtgctaggtttgagtcttttgatatgtgcatccatgttaatgcacccatagaagacaggagattaataagggtcatggggtgatttgaggaaggaaagatccaatgcagatggtatgaagaaagactggagaataccagaagacaaaagattctgtgagatgaggaatagggatacgggtagaaggggaagtatgagatggcggtaactagcaccaaatacctgtagaaatgctgtgtgaaaccctactagtatagaagactcctaaaatatatacacatacaggtattaaaagaggtttaaatggaattactatataacagggggagacaggaggaagaatggtttacctggatatcataagttatcaaatagagagtccagttccaggaataggctacctttttttttttacttgtttgtcagcaggttcccatatactcccaaacattataggctattgtcatcgttcttgattaccctccagaacttgatggtgagactttattactgaagataccacatacttgagtcagaacttagagaaatcatgctggtaccaaacaagcttcatccctactggctgactctcagagtgctaaaaactgttatacaggatatataaaaagaaacgtaaccatccccacactacccagctgtgaaccaatatgaactacaatgaccagtctggactcctaatgatccctatattctaatagtctatttcactaagattgcatcaatgggttccactgataaattagtcccctcatgatccactgccctttcaatagtgtcatcagtagggcatcgaatctttaacacctgagctatttggagtgacacttcatattcaaatcagcaacttataggtaaatatgcaagggtgaaatattaaaggtactattgaagtactatagaataagagatggagtgaccagttttgcctgaatgaggtagagaatagacaaggagaaagtaactgatgtcattgctgctgctgctactactagtgatgatgatgatgatgatgatgatggcgactgtaatgataaagagcagagagaaaaagaaagaaaagaagtaatgggaaacaaaagaggaagaagaagaaaaaaagagaatgaggaggaagaaaagggaaagagtactaccattatcatcacctgtggagctgaaccacttcaaatctattttacaccactgtctcctctactcacttctattcagtctcatagactagttgtcatttctcagccactccagaaattttctttgcattgttttattatcattttggtttaaatatgtgtagatatgtatgagtatgtgtgtaaacaacattgaaatatgaaatttacttcctactgtgaatttttgacaaaactgtgttgcaaaaccctattacagagcaatagatatgtgactttggtaaatcagagaattctttgaaaaatctgattctgaaattggagaatacacagatggtgcctgaaattgcagtattttctgtccaggttcagaaaaaattctcaaaaggtaaaatgagttccaaaatccactaggagcctaatataaaaagtatactggaaattgatcctcactgagacattgacatcttctattgatgccccattctgacaagtaagagaactccagaaggagatgcccctgttcctatgacctttaacctctaatagcctattgacgagaaataaaaacataggtggccaaatcctgtgtctcaccataaacataaaagcaaaaaggaaaaagaattgacatgaggctaaaatagctcaaatgtccccaaaccatacaagtgactatcagaatatatctcccaattccatctcacactggacatacccaaaatttgtcttaatcacatgaataatgaccaacttgggaaaaaataagataaaggcatagaggagctttttgaaaaatatgtgtccaaaaagaggacacatgattaaaaacaaacttttgacctctccctcccactccattccaactaacccatcagagaagacaacaggacatttaagatatttgagtcattgaaaattatagttggcatttatagtggtgcactcaatgctatttgcacacaattagccactgctgacccaaacatttactgctcttccatggaatggtcattctcaaaagctttccaaagagaaaagaacacctgagacgaaggtgtcacttcctgaaagaagctctcatctgatcttcattgtagccatatcgagactacaaaaataatgtggttttaaaaagattggtttcttctgacattagtaaagtgtcctccacctaaatacacaccatctgagtggtcagccaggatgagtccctggaaacaagagcctttcttggctgaaagtctttattttttcaaccatcaaatggtaagtaacactttttgaaatgcccattaaggatcaaataatggaactgagaggctcacattgtccctgggattccttaactgaagttactcctgccatcatcaccacgaggctagcaccactcaaagaccaaagtcaagtgctgaaaggccaggtgaaataagagtcagaaaaaccttcaatcacaatgcttgcccataagaataagtcatcaaagaacttctcaagagctgctgcacagtggcaatgagctgcagagtagaaatcctagcttctgccctcttgggggcactcaaggagaacagcctaagtgcttcagtcaatttacagcaaagctctctattttgtccacttgtgagataaaaaatgttggtgagcaggaaaaacattgccctagactaaaggtctcctgatgaaatgagtaaatctattaagcaatcctctgtccacagctatgtgagtgtctatgtatgtggcctctgtgtacctgagtcagtaaacaaaagggaactaccagtgagtggtgatcacgtaggccctggatagaaggcttcttttatttttaatttatctatttgggcttacatgagtcaataatggcataactgtgcaagacaagaacttttgaaagatggagggatagacacaaaatgatgaaatcctcaacattatgatgacaatggttgttgatataagaaatgtaaactaagcctatgaacttatatgcagtgaatagatttttttatttcaagggtaatactaatacagaaaagcttcataataggatgacacaatagtgggtcgctactgtgcagaaatgttaatggagcacagatgttctgtgggctgctgttatgtatgatgatatattgtttatgatttaataaagcctcactggagatcaaaatataaagctagctacagccattgagccaggcagtggtgatacacacatttaatcccaggactcttgagacagacagacagatctctgttagctcaagaccacactgagatatatgaaatccatccagtctaaaacagatacagctcacgcaaaggttatctcggcacttgggatcacatgcctttaatcccagcacctgggaggcagaatcaggtggatctctgtaagtccaaaactatcctgggttacacaagagtgaatcagagcttacacctttaatcctaggatttgagaattatttttttaaaaagaagcaaagggtctcatatgggatttagtttctagacagggaaggcataggattgcagtctgagaagagaagtgtagcttggagatgcaatcagaggacacaatcacctcttctgtctgagcattggtagaggtaagaaatctctatgacttggctgcttttttctatgattttcaggttgaagcttgaagcttgaaccccaatatctatctctggatttttatttttcctgttacagttatgatcaacaatcaagaaaggtacaacacactagtcttgttcccaaggtctacatctcatcagttgtttgtggtttaagatgtcaaagaccaagaaagttgtgaagatctttcatctgtgaggctaaagaacactgtagagtaccaaccagtgtgtatgggcgctcaactagccactgtgcttggttctcagtgatatcactttctagtcaaaatatagaagactgcacacgcagatgctaatgataccaggcaaggggaactatacaacttctgtgaggctcttgatctgtattcttatgggtttcaaatggcaatgaaatgggtctgtagggtagagaaggtcttcagatgtggattcttagccatgggaacaaagacggcatgaggaaaaacagaatgataaacatgacacatgacactccagaaaaatattcttccaaatatttatatgagaaatctagccctgtttcctcaacatctgtattctctatcactgtaggctgagaaataatttcttggcacagttaagggaattttttttcttttcaacatattcaagatacagggttacacagagtccttgccatcacatttttcttttttgaaatttccttctcccaaatgtttgtgtcatgagagatcatgagtagcaaaaagattattgtgacaagtgagttccaatcaaaatgcaattttattaaaaattatattagaaatgatggacaataattcttttcaatgacaaaagctaaattttaaacttaagaaactgtgaaaatgaatatgtcaaaaagaaatgtagggatgtacaaaagtaaatagacaaaaaggtagacactgtgacatccaagtgagtcgcttcagttgaattctgaatgtgaaagtgagaacctagtgagacaacattatctggatgcctcactgagccctagagtagaagataagtgacttagcaggggttttcttttataaatgaagccttaaattaggaacagagagctgagatcaaagaaagagtctaccatgtatcaataggacccagaaagtgacaagccagtttgtgaagaccctgaaattgggaaaggcagtttgtaccatcaccacagtacctggagcccagatttagtttgaaagaggcactttggaaaagagttgtccataattgttgttattttatagtctattttgtattctataacagaaagctacagattgggttctgtaatcaataaataagagaagagtagttggctcattgttgagaagtcaaagaataaggactgcatctgtgagggccagctttctgttcataatatgatagaagtcaacatataataaaagggaattttaaaaagagtaaggtctgatttccaaaatatacaatgaattcaagaagctagccaccaaaacaccaaactatgaaatcaaaaagtggggtgcagaactcaatagagaattctcaacagaggaatctgaaatagctgaaagacacttaagaaagtgctcaaaaacctaggccatcagagaaatgcaactcaaaacaactctgaggtaccacctcacacctgtcacaatggctaaaatcaaaaacactaatgacagtttatgctggagaggatgtggagaaaggggaacacttctctactgctggtggctgtgccaacttgtacagccactttggaaatcagtatggtgactcctcaagaaaatgggaatcagtctactacaagatccagcaattccaatcctaggcatataccccaaagaagcacattcatacagcaaagacatctgttcaacgattttcatagcagcactatttgtaatagccagaaactggaagcagcctagatgcccctcaacaaagaatggatagagaaaatgtgatacatttacacaatggagtactactcagcagaaaaaaacaatggaatcttgaaatttgcaggaaaatgaatggaactcgaagaaaccattctgagcaaggtaacccaatcacaaaaacaaacatgatatgtactctctcgtatgtggattttagacatagagtaagggattagcagcctacaatccacactgccagataaactagtaaacaaggaggaccctaaaagagacaaactttgttccctggagaagaggaaagggtcaacatcccctgagcaaattgagaacatgggaagagggaggaggaagctacgagaatgagaagggaagaaaatgacgcatgcagaggtcatgggggagcagaaaggttgagtcaggtgtagattagaagaaaggatatgtgataggtagggttttagtcgagggggtaatagggaggaagggagggagaagggaactgggattgtcatgcaattcaatcttgtttgtaattaaaattttaaaaagtcaaaaaatgaaatggaaatattaaatccaaaaaaaagagtaaggtagggccaaatgtgcttttataatatggccacatgtacagtgatcacactaatccataggaaaaagtcctcattacctacccagctcttaaaattatcacctcttaacactgcaacactgaggaccaagttttcaatacatagactctgagggacacattcaaatcataatattccacttgcctcccaaaatccaccgcattttcacatgcaaaacatgttcatctcattccatttagcctccaaagcctcaactcattgcaacatcaactcaaaagtccagagtccttaatcccactaccactagaaatacctcagaaaataattcaaggagagatttttgtgatcaagagtgagcactatacttatctgtgggcctaaggacaaataattagaacataattagggaatgcgctcatttagtaggcacaaacatgaggttagcatggacaacaatagacatgctaaattggacaggggaaagcccatgaagcctcagccatacacaaagtaccacaggcaactaaggaatgcggaaaggaagaaaaaaattaccactagggaagaaaacaccgattggttatgcaatactatctcataagaatggttttccctctgatttttaaaaacttattctttgagaaattcatacatgcacacaatgatttccagtctcattcaccaccacccccactccccaactctagattctcctcctaaatttctctagtatttacacctcctaactttttcttttcttcttatttttttgttttgtttggtttggtttggtttctttctcaagacagggtttttatgagtagcagccctggctgctctggaaatctctttgtagaccaggctgacctcgaactcacagacatccatctgcctctgcctccagagtgctgggattaaaggcatgggcccccaccacctggtttcctcctaacttcttgtctactttactatagcccactgagtccaattagtgcatggttataggatcatctacaaaggaccatacctctaaagacaatggaatctcccttcctttaccatccttcagttgtcagtagattctttgatattcagttccatatgcaacttcttcagaatgtcattcactgtctgtgtccccaccaggattctgatcacaaatgatatataatccccagactttccctaaagttatgtgcttccctcttaatcacagattccatccttaaatatctccccttcttgttactttactataaacagccaaaagaatccatgacagcagcttgaatgcttaacgatatagatattttctctctcagataccccaattcattgctcctgaattctgacttttataaaacccagtttacaaataacagaagtttgtctcaaaattatggaggctgggaaatcccaagtcacatgtgatgatggtcttcttgctacatcataagcaaggcatcacatggaaaagaagtacacaacaggatacaagaagagaccagaatcactttttttactaactcactcttgccatagtgatatgtagacagaagtttctgtccagcctggttccgcagctgtttagtcccaaataaacacacagaggcttatgttaatataaactgtttggcctatagctcaggcttcttataggctatctctctcttaatcattaacccatatctattagtctatgtatctccacgtggtcttggcttactggagaatgcccaagcatactatcttcctgatagctatatgccacctctctcatgactcactctctacattcctcttcccagcattctcctggtctggtagacccactgtacttcctgcctggctacatcatgcctgtctattagctgaaacagctttattcatcaaccaataagagaaatacatattcacagcatacaggagggcatcccctatcagtgatctgaattcattcatgaggatagagttcagtgaactaattactccttaatggaattaattggacctagaaactaaaagcctagtttgtgaggatgccagagctggggaagagaagtagaagtctaccagctgcctggagcctggtgtttaaagtctgaaagagaaaattggctaaaagttcagtcacaatctctgtatgaaatattagatcatgagaaaaatagaacaaatcactctgttagaaagagacaatgggaatctaagtgggaatacacactatatttaggactccccagggagaatctggttttttcatttgtcccttgtcagaattactgaaacataggaagcatctctccctctctttcaactatcatcccgttaaagttgaattctgccatgctcactttaagaaaattgttcttgcaaaggtcagagatgaaatttttattgctacatccagcatcctttccacttagatctctctggtgcagctaatactactggacactgctttctgggaagctgcactagcttggtttccatgacaccacacacatttgttctcccagttgccttcaaatctatgaacgtaaatgttccctcaaatcagtgctcagccccttgaccttctctattttctctcttccactgcaggagacaatcacttgtttcatcattacttatagaataattactctgaagtctgtatttctaaacctaagtggcaatcacagatctcgaactctccattgccttttcttctcttagttcacactatcatttcaaggttagcactttggacccaacttttgcctccatctcctcccagtgggctctcccctgtcggacccacagcagtagcatcttatctttccaaatgatttgtgctacattttggacatagctcccaaagttccaacacatttccccaaaatcatgtgtcaattggggccttttggaaatgattagttaattgtagattatagattactggttatcattaggtgcctttattattaaaagcaatctttctctggcatgctcactctgtttcacattgttaccttttaccatatcataatgcagtaaaaatgctctctccagaggttagcaccatgctctgagactgcccagagtcaataactgttaaataagcctctactcattataaattactgagtctgtggcattcattttagcagcagaaaatgataacaagcaataaaaagtttaggataaagtctagttcgagttaacatcatacacacttttattctcatcttttcccatgattcctttttgctaagtataattgaatatatttgattttatggaatgacataacagggaggcaattacttaattttaattctcaactctatttttctacctaaatattcttcaaatattcttgtaactaacagaacctatggaaaataattcttagtattaaagaattttagtagtgccccttgtccacttcaatttcttcctgtctagttttttctaagagcgattgtgatcacaacatgccacaaacagccaagactttagactgctaaaatatgattgaatccctcaggtttcaatcatgtaatcctttaattatatcttacacatctgccttgttgcatccattcttttggttctgacagtgccttcccttgtcctctctgaaggtacctctagttttacgatggctgactgaagcaggacacctctattctggccagacatatcaccctgcttcttttcaatatattggtgcctttccttcctcacaggatccacccagatggaaaccacagcctggacctgaatgttcagtggcaacacaggatccaaacttttgttctctgtgagaactccactcagctctgaagactcaggattaatttccctacatcatgatatcaagagtcttcatttctctgttagaaatatttcttggtttccatcttcatggttgctaagccatgtgctattttattctatagcctgcaaaacataccatggtaggggcacttaaaaataccagtacccactttttctacattcttttcattctagtagtaaccaaccctacttttccaccaagatttctctttacagtatttccaaattcaacaatacatgttgtcactagtccccaacagcagtataaatctctgttctaccaagatctttggactagctcatattttcccctagctgggaatatatggattcattgacaatttaaaaagattccatctatactgatatctggaccctattgctaacagattagtaatttattaatttatgatgaagattataagcatctggttaacacattctttcaattttatgatattcattgattaacgcctcaatctgtaattacatattccctaggttcatagtgaactctaccctcagcttttatttatagcactacctaatcattttattcaattacattatacaatgtgttgctactaagctctatgtcaaaaataatcttaacctggaatagtggcaatggctcagtggattaagtgactattgttcaagcataagaacctgagtacaaattgggagcatggggagagagagggggagttaggagaaagagaaggggagaggaagaatgagagagcaagaagatcaagtcagcaggagaatagaggagagccagataagagacaccatcatagagggagccattataggtttaaagagaaatctggcactagggaaatgcccagaggtctacaaagttgaccacaactaacaatctaagcaacagtggagagactaccttaactgcccttctccaataacgagattgaagactaccttatatgccattctagagccttcatccagtagctgataaaagacacccacagctaaacactgaactgaactctggaatccagttgaagagagggagtagtgatgagcaaaggggtcaagaccagactggagaaacccacagaaactgctgacctgaacaagggggagctcatggaccccaaactgatagctgggaaaccagcataggactgctccagaccccttgaatgaggacatcagtttggaggtctgggtaatctatggggcctctggtagtggatcaatatttatccctagtacaagaatggaccttgggagcccattccacatatatggatattctctcagcctagacacacgggggagggtctaggccctgctccaaatgatatgacagactttaaagatcccccatggaaggcctcaccctccatggagatgagattggggtgcaggggaagagaataggaagagggaactgggattgatatgtaaaacaagcatgtttctaatttattggtttggtggggttttttaggatttttcaagacagggtttctccatattgctttggaggttgtcctggaacctgctctgtagatcaggctggcctcaaactcatagagatctgcctgcctctgcctcccaagtgctgggattaaaggcatgcaccaccaacacctggcttgtttctaatttaatttttttaaaaacttcaaaaaaagaaagaacctgagctcatatccccagtacccacataaaagctaggcatggtataacacttctatgatggctagtgttgggtgtaggctattaaaagggttagctcagccaattgagccaaagttgcaagctctagatctacttagtgacaactttgtgtcaaaaaataaggtagaggccacagaggaagccatggaataatgacctctggcatccacatatgtgcacacacagtctttgatcttaaccttattgtagtggcttgaatgaaaatgaccccaataggtttgtgtatctgaatacttggtccccagttggtaaaactgtttgagaaaggttaggaggcatggccttgctaaaggagatctgtccctgggggtgagctttgagatctcaaaggacccatgctttacctagtctaccattgcctgtctgtcttaaggttatgtctcaatatatgggattccaactactcttccaggaccagccatgcctgcctaactgctgccatgcaccccaacatgctggccatgaactctactaaccctctgtaactaaatcctaaacaaattcttctgttagttaccttgactatggtgtcttgcctcagtaataggaaaataactaagatattttgaagagtccacaaaagtggaaataatgtgcatttgggtctttagaaaagttttataaaggagatgacttttgagattaattttgaagaacatttaggatttgaataaaaagaaaaagataaaagagaatttcaaggcaatgaatagaagtaacaaaatcaggaaagctagccataagtgaagagcaacaattagagatgtttgattggagaatgggatttgattaggagatcataggcaagttagggtgatactggagacagcattggtttccaagtggagggattgagatttactccaggagatgatgggatgtgcaactccaaccaactgtagtattcacccatagtgagcaagtcagataagactctacaacctgatattcaacttagattagaaaaaaaatagtagataatagctattgcctagagatgaggacttgaagaataatgagagcagaattagagaaagtgaattacccatggtagttattgtgtcattgaaaaggctaattaacctgaggtgagctgagaggcaagagggtaaataataagaagctagacaaaaagaatagggataaagattatatagactttagaggtgaaaaagaaaatcaagcaagcagaaagagaaaagaataagtttgatatcttagaagctaagtaggtttgagtagtgactaataatggttgacttttaaaatagtagcagagaaaatagggatgaaggtcattggtgctataaaatacttgccccccccccccgacttaattcccacacctaattctgtgcctgggaatgagtgcacaaatatgagtatgatgtattgatgaggtcatcagcaatgacagacttttggtgtccagggcctcagaagaaagagtgggaaaaaggaagatgcagacatctcagtagttgtgtatgtcaccaaaaacagtcatgatgagaagtgagaaagtttagggtaagaaagcatcatgagtcattaaggaaaggctgaatgacaatagtagaaaactagtaagcttcaaagcaaatagaaaatttgtgcttcactgtcctgacctgcaggacatcaacctggggcaagagagtcagggatagggaatggggacaagagacacagaaagaacgaccacaagacaagattctgatcaagtggcaaactttacttttttctcaggctagcttatatagtcggcagagcaggatatggggaggggtagaatggttgtttgtgagccaggtgttagtgtaggcaggatattaggaagccacaaagaggatgtttggcaggataaagagtatatgagtaagaggtccaggaaggattgcctaggtaactgagcgtgtgggtggaggactaggtcaggttgtttcttttcttgagctgaggtactaaggagctgctatgtcaaggttaactatgtggcctgccaagcatgacctaggatctcatgccaagccatgagatttggctagcaacacttcacaactacctttaacctcttagtaatgcccggatacttcattcctccataattaattaatcaaatacaaaaggacaaatagactttttagagtaaccaaaaatagaacacaggctattttccatagctttagtaggtatgcaattgccctgttcccatatccctttctgcaaagcacagggtcatgagatggagagccagctgcaaaatggaacaaggccttactcttgttgtcaacctgaccccttgttccatctgtaggaccttgtagctctgcagctcccctcttcctagaaataaaatctgggtcacaggggttagaactctaatgaataacttccattgtctaatgaataacttccattgatttcccacctaggagaatcagcattccttttccaacaacagctgtgattattggcagaaagaaggaggaacctgagaaggcttctctccacccctcaacatcatcaaaggcacatataaaacctaaatgcttggagccttaagagtgtagtgggcagccatctttctgtctcctactcaagtaactgctgctgctgctgctgccatagccctggacaaagagcatggacaagatgctgctgctgcttggggtatctatcctcctttcagaagcctttgctcagacaggtaagaaatttaggctacagtcagggagagaaatcgatcttgagctattgtttctctgaatttgttgaaacttactatatgtcttactttatctcacagacctcacaggaaaggtatttgtgttccccagagagtctgaaactgattatgtgaagctgatcccacatctggaaaaaccactggagaacttcacactgtgtttttgaacctatactgacctttcccgccctcacagtcttttctcctacaataccaaggacaaagacaatgagctgctaatttataaggaaagaattggagaatacggattgtacattggaaatttgggagccatagtccgtggggtggaagaatttgcttctccagtgcatttctgcaccagttgggagtcctcttctggcattgctgaattttgggtcaatgggaaaccttgggtaaaaaagggtctgaagaaggggtacactgtgaaagcccaacccagtattatcctaggacaggagcaggataagtatggaggagggtttgataagtcccagtcctttgtaggggagatgggggatttgaacatgtgggactctgtgctgaccccagaagaaattaaatctgtatatgaaggttcctggcttaagcctaacattctggattggcaggctctggattatgaaatgaatggctatgcagtcattaggcctcgtgtgtgggattaagatcttacaacaaaatctcatgaaaatgaaatgaccaatgtccaagaggtcaagtcagcacaactcaacacttaatcctgaatctgcagccttttctcgcttgtgaacttcctgtctacttatctgcctaataaaaatattatcaagttctgcctgcattctttgccacttgatgtaatctcaaatgctttcttttagatttactccttttgaaaattggtgctttgatatctagaaaaattgagttgtaaaatgaagggatggaaaattaacaaagaggaaaatggcaacacttataagctactggtaatcaatttaataataacacaaaatattgtggaattgcagtagaaatccctccacttgtttatccaaatacaagtcaattaaaaagcctgatatagctcaagggacacaactataataagacaggtaaatgacaattgagatcttgacagcaaataatgagatgggaaatccaggataagaatgaaaactaaacatgtataagaaactgagattggtcctgcgacaggtgcccgagcctcagctgagtctgggcactgctctgcccccacaagctccccattcaaccctgctggcttctgcctgaacctcccccccagaggagtggacctggccagactggaaggcaaaccctgagttgggacacacctcacacctctctatactctgccctcagtcctgcagtgggcatcctagcctcaggtgagtctgggggctgctctgcccccccaaactccaccatcaatccctgcttgcttctgcctgagctcacccgagcaagagtagacctgcccagactgggaagtcccaccctgagttcggacacacctcacccttgtccacccaccaccctctgccatctggctgacaccagaggctgagccctccgctggccactggaaaaagggagagaccccacctgcactcactggaagaagggatgggtcttaaactgaccataaaaagatacaggctaacagaatggatacacagacaaaatccatcctgctgtatgcaagaaacacacctcaacttcaaagacaggtgttacctcagagtaaagggttgggaaaagattttccaatcaaatgggcccaagaaacaaactggtgtagcaatcctaatatctaacaattcagacttccaactaaaatcaattaaaagagatgaagaagagcattttatattcatcaaaggaaaagtccatcaagatgaagtctcaatcctgaacatctatgccccaaataggaaggcacccacatttgtaaaagaaacattacaaaagctcaaactacacataaaaccacacacacttatagtaggagacttcaacaccctgctttcaccactgtacaggaccaccaaacacaaacttaaaaagaaacaaatgatctaacagaagttataacccacctgggtttaacaggtatctatagagcattccaaccaaacacgaaagaatatacctttttctcagcaccacattgcaccttctctaaaattgaccacatagttggcaacaaagcaaacttccacagatacaaaagaattgaaataaccccctgtatcttatcagatcaccatgctttaaagctagaattcaacagcaatacaaattgcagaaaacctacaaactcatggaaattgaataacacccaattgcaccattcctggattgaggaagaaataaaaaaagaaattaaagacttcttagaatttaatgagaatgtagacacaacatacctaaacttatgggacactctgaaagcagtgctaagaggaaagttcatagcactaagtgtccccatgaagaaactggagaatagtcacatgagagaattgacagaacaactgaaaattttagagaaaaaagaagaaaactcaccacagaggagtagacaccaggaaataatcaaactgagggctgaaatcaataaaatagaaactaggaaaacattacaaagaatcaatgaaacaaagagttggttctttgagatcaacaagatagaaaaacctttacccaaactaaccaaaagacagagtgagagagcacgctaattaacaaaatcagaaatgaaaagggggatataacaacagacactgaggaaagccagagaatcatcaggtcatactttgaaaacctgtactccacaaaatttgaaaatctaaaggaaatggacagtttcctggatagatatcacttaccaaaattaaaccaagaacagataagcagtttaaatcaacctataacccctaatgaaatagaagcagtcatcaaacatctcctaaccaaacaaagcccagggccacatggcttcaatgcagaattctactagaaattcaaacaagagctgataacagtactccttaaattgttctacacaatagaagcagaagggacatagccaaactctctttatgaggctacaatcactttgatatccaagccacacagagatacaactaaaaaagagaactacagaccactatccctcatgaacatcaatgcaaaaatactcaacaaaatattggcaaatcaaatctaagaacacatcagaaaaatcatccactataatcaagcaggcttcatccagggatgcaggcatggttcaacatatgaaaatccatcaatgtaatccaccatataaacaaactgaaaaagaaaaaccacatgatcatctcactagatgttgaaaagcctttgacaaaatccaaaatcccttcatgataaagatcttggagagaacaggaataacagggaaatatctaaacatgataaaggtaatatataccaaaccaacagccaacatcaaaccaaatgtagagaaagtcaaattgattcctctaaactcagaaacaagacaaggctgtctactctctccatatcgcttcaatattgtactggaagttctagctagaccaataagacaacaaaaggagatgaaagggatacaaattggaaagaatgaagtcaaactttcactatttgcagatgatatgatagtctacataagtgacccgaaaaaccctaccagggaactcctatagctgataaacaccttcaggaaagtagcaggatacaaaattaactcaacaaaatcggtagccctactatatagagatgataaatccaatgaaaaagatatcagagaaacatcacccttcacaatatccacaagcaacataaaatatcttggggtaacactaacgaaaaaagcgaaagacctgtacagtaaaaactttgagtctttaaagaaagaaattaaagaagataccagaaaatggaaagatccccatgctcctggataggtagaatcaacatagtaaaaatggcaatcttgccaaaagtaatctacagattcaacacaatccccatcaaaatcccaacacagttcttcacagaacttgaaagaacagttcccaactttatatggaaaaacaaaaaaacagaggatagacaaaacaactctgtacaataaaggatcttctggaggcatcaccatccctgacttcaagctctattatagagccatagttttgaaaacagcttggtattggcacaagaatagataggtagatcaatggaattgaaccgaaaaccctgatattaacccacacacctaggaacaccttattttttacaaagatgctaaatctatacaatggaagaaagatggcatctttaacaaatggtgctggcacaactggatttggacatgcagaagattgcagatagatccatacctgtcaccatgcacaaaacttaagtgcaaatggatcaaagatctcaacataaatccagccacactgaatcttccagaagagaaagtgggagatacccttgaattaattggtacaggagactgcttcctgaacattacaccagtagcacagacattgagatctgcaattaataaatgggacctcctaaaactgagaagcttctgtaaggcaaaggacacagtcagtaaaataaaacggcagcccacagaatgggaaaagatcttcatcatccccacatctgacagaggtctgatctccaaaatatacaatgaactcaagaagctagccaccaaaacaccaaacaatgaaattagaaagtggggtgcagaactaaatagagaattctcaacagaggaatctgaagtggctgaaagacacttaagaaagtgcccaaattccttggccatcagagaaatgcaactcaaaacaactctgagataccatcttacaccagccagaatggctaaaatcaaagataccaatgagaggatgtggagcaaaaggaacactcctccattgctggtgggagtgcgaacttgtaagaccactttggaaatcagtatggctgttgctcagaaaaatgggagtcagtctacctcaagatccagcaattcctctcctgggcatgtacccaaataatgcacttcatacaaggacatatgttcaaccatgttcatagcagccttgtttgtaatagccaggacctgaaagcaacctagatgctcctcaactgaaaaatggataagaaagtgtggtacatttatacaatgaagtactactcagcagaaaaaagcaatggaatcttgaaattctcaggcaaggtaacccagtcacaaaaagacaaacacggtatgtactcactcatttatgaattttagacatagagcaaaggattaccatcctataatccacactgccagagaaactgtaaacaaggaggaccctaaaagagacaaacattgtcccctagagaaggggaaagcatcaggatcccctgagcaaattgagagcatggaaagaggagagaatgagaggaggagaagaggaaagaagaggaagaaatggaggagcagaaatattgagttgggggaagaatagaggagagcaggatgagagataccatattagagagagccattatagttctgaggagagatctgtcactagggagatttccagagacctacaaggatgacaccaactgacaatgtaggcaatggtgaagaggataacctaaacaccctttgcctataataaaactgatgactactttttatgctatcctagagcccttatccagtggctgctggaagcagaggcagacacccacagatatacactgaactaaagtctggaacatatttgcagagagggaggaattaagatcaaaggggtgggtaccaggctggtgaaacccacagaaacagctggcctgaacaaaggggagcacgtccaccccagactgctatctgggaggccagcatgggactgatccagacccctgaacatggatgtcaatgaggaggcctctgcactctagggggcccctggtagtggattagtatttttctctggtgtaagaagggactttgagagcccatcccacattaagggatacactcttggcctggacacgtggggaagggcctaggcccagtccaggatgatgtggtgaactttggggagcccctgtcaagggccctaccccctaccctgcctggggagtggagggtggatggggtggggaataggttgggatgggggaggggtggagggtagaggagggagagggagaagggattgacttgtgaaacaagcttgttcctaatttgaactaatgaaaaaattaaagtgaaacaaaagaaactgggatcattttggacaaagaaaaacatgattgatgtttcaaaattcccaatggtggtgtataacacctggcttttgtaaggtcacccaaacgtcatcaagagcagaaacgtaaggactctctctctcttctctcactctctctctctctctctctctctctctctctctctctctctctctctctcttcctctctctctcctctctttgtccctctctctgtttctctgtctctctctgtctatctgcctatctctgtctatgtctctgtgtctgtctctctctcacacacacacaaaaactataaattggaaaccatactgtacaagcaaaaataaataacataaaaattctcaaccaaagcaatatgagaagaaaatctgcaaaaatgccattagttcattttacgtttgtccagtagagactgctggacatgaggccttgttaagtgtcatttatatacctagtgactccactggtgaaaactgatttttcttttgtgagaagttgtcagttggagatagctccctagttagggatggaaacacacgtccactttctcctttcagttcttgggacctcatctggcttgaagctgtgatggccctgtgcatgctatcacagtctctgtgacttcatatttgggtcagtccctgcgactggaaggccttgtttccttggtgcccttcatatcaactgactcttctacatctcttcttccttttctataattttcccctgactcgtgaggggaggggtgtgatgaagccatcccatttaagactgggtgctctgaggtctctcaccctctgcacatcatccaggggtggtttctgtattagttcctagctgcatcaaggaggaagtgtctctgatggctgaattcaacatccctattacaagttcaggtttgctttatggtctttaatgttaaggaacctttctagggactcagaggtggttccacagacaagagcatcgcctgagcaagcaggaagacctgaattcagatccccagcacccacatcaaaagccagatgttgtcatatagacctggaaatgcagtgttgggcctgggagtgaagacagaagatcactggaactcactggtcagacagttcatcaaaaaaaaaaaaaaatggtgagttccaggttcagttagaaatcctgtctctaagagatatatggcagagaaggaccgagtaggacacgacatttttcttcttttcttcctcacatacataccaatgcgtgcacgcacgtgcacatacacacacacatacacacacacacacacacacacacacacacacacaggtgtacacatttacatactctatacacacatggatacacagagagatacctttcaaaagacatgtactaaaaatgactatctattcttgagtaattggtatttctaccaacagcatgcaaacacattgtttgccttaatattgcatctctatagtaggctgttttgtttagcatcccctctggaaataacataaaacaaattttaggaatgaacccagtacactcaagtagtagcgtccattttttcaatatttattgagccacaattccattccaggcatgatgccagctactggaaatgttatactggtgaaataatcatggcacttgcctttttttggagtttatattctaagtatgggtcccttctaacaataatcagtctgtgctgtaatccatccttcacatcttcaggcttctcttctgagtggtgtgctcctgttcccctcaactcccacctaagacagtggtatcatttattctcatctatcattttgtaactatgtttgtgtctgttagaatccagtttggagccgggcagtggtggctcatgcttttaatcccagcactagagaggcagaggttggcagatttctgtaagttcaagaccagcttggtctacgaagccatagagaaaccctgtcttgaaaaacaaaaacaaaaaacaaaaaaaaacaaaaaacaaaaaacaaacaacaacaaaaagaatccagtttgaacccagtttattgcatataaaacccccacctggaagggctcttttttatatagaatccaagatgatgatgtatcagttctttctgttatgtggcccaaacttcatccaaaaaaaaaaaaaaaaaaaacactcatgcatcctttagtcctgtaaattctaggagttcacaatgatcttaattcagacaatacttccctacttctacaatggccctggccttctcaagttctgtgagacttggaataccaaggagcatgttgcagctttgtgtttccatgggaactgtctcactaagcctgaagtgaaagaagctgaaagaccaataaccatcttctcaagaaaccagatacatgacccatgactccatcaagcaacaactcaaagcagtacctctctctaaaaaagttctttcccttccctgtagtcggtcacaccttgttttggctgaggaatacaagcatcacagattcttaatcatttcctttgtcaattcttgtatgtggaattgtgtagttattatattatcatcatctaatttatattattaattattcattcaagactaaataaaatttgtccctctaagagtcaaaaaccgtctaacaaaaactcaaatatcaaacacaagaagccctctttttaattgtttgtcagggttgtctaaaaattcttaagacattacaagctattgttcttgccattggttgtctgcccaggggtagaagttaaatccctaatattgaagacatcgtgcacttcaaacagagggcccagaggttcctgagctagaaatgacttgaatgtctcttttctgaggactaattttcatggtaccataatgttccatgtaagtttccaaagatggaaacaaccaatagtcctacccagttgtgacaactatgaaacacaacgaccagaatgacacagtaaccctaagggcacaattgtggcatccatgccttggaagtaaccaacaactctctaattgaactgaagacccaccttttcaacaagaaggaaacaatgcctggtactagatacctagctcttaggtgtaggcattatagatgtatctattgggaccgggtccacaactcagaattttgattggctgtagttttctgtaatggcctccatctgttgcatagagttttcttgacgtggagtcagctgcagttagctttgagtatagagaaaacatttagactgtagttaggaattgtgctggcatagtaaagttgtaattgtaggtccttcttctttactaggcctaggcaatttgttagaaaggaaggcataaagattctaagagccagaggaatggtacatttgctgtgatattgtatctcctaggaatgtcagtaatatacccatgaagtctgaacctggctgtatatcatgacttgaacaagaatatcattggaaatgtcagtgtagaagtgggttatcacatgagccctcaaccgaacataaggaactacaagcaactaaggaatgctgagagtgggagaaatagtcttccccagggaagaggacatcaattagttatccaataccaaatggtcagccctgaagacagacgtacaaattgagcatattgcatttctgcatttaggagtatgtgtgtatgtaacaacaactaatgaagaaagagaccatgaagagcaagaaggagtgtatggaagtgcaaaatagtgtcgttataataatctcaaaaacaaaagaaaggacagttgcatgtaagtattatatttaatacaggaagagaacttctgataattgattatgaacatttttcccaagtacaatagaaacagcaaaatatcacagaggagatgacttgagtgatttggagtctataaggaatatagaaatatttgagggtcacaataatccgggcaagtgactccaggtatactcatttcaacattgccttgataatctacccttctccatggttgtcattaaaactgtgagactccgtgaacaagagatacagttttgcaatgaggggcctaataatcatctcgataaactttttagtcgctttgttgtataaagatgtgattcatatttatgtgtctacagaagagcaggtaagagcattttccaggttccagactgactttttatcagagtagaccataatgaatttcaagagagaagacattgcatttagtgctctgtagtttcaaagggaaactatgtggggatgtctgaggctaaaggaagaaattctctttgacttgaaatatgccttagctcagacttagttggaatagagatgaaaagggtatttggtgagcatgagagaaaatcaagtgtaatcttatttggagaacatggaagattttttaagtatttgttaaactctgtgttgtctggaaagaatacatgtataagactattcaaagagcaagatagggaagatattaaagaatcgcctttagtctttaccagaacatggctaaatgcatgataaactcatacagtaacctaattttgtgtatcagggactgaggagatgactcagttagcaaagtagttgctgctcaaattatgggagttgagtttggatccccagcacccatatataagctaagcaggaaggcatgtgattgtaaaaccagcactgggaaggtaaacagacagatctctgaagctctgcgtccagacaacttaggcaaaccaccaagtgccaggttgactaaaagaccatatctcaaaatgtagggtagagggctattgaagaagaaatccattgtcagtctctgacatccatatgcatacacacacacacacacacacacacacacacacacacacacacacatatatatatatatatatatatatatatatgcatgtatatgtattcatacacttgtacacaaaatattttaaaataaaaataaatgaataagaaagcaaatgagcttgtactccagggattctatttagtttttgtccatggccattcttttctaagatcagcatgagaaattctaagagacatccccatacagaggtggttaaggtatatgtgggtaggtgtatacaaccacagaatccaaaaggaaagtgaatctcacgttaccaataccaaggccacagtcacaccttcatcagaatgagagccaaaggcaaatgcaaaacccttcactcggtgctctagaagttgcagcggcttgtccaaagtaatctcatagaaatcctgcagggactagaggtaaagatgcatgaaagacctcctgggtacatgatatggcatggtgtgtgtgcccagtgttcctgtgatgagaactgaggagaatgcctctctggaacacaaagtcctttgctttaactgccttgtatgtctttctacagaatgaaaacaaaggggagggggataatttttcataccccattgtcattctcattcaccagaccgaagccttttctcaacaaatccatgcatgtcccctgctagtagaaaaagtaaggtaagctcttaaaacacagatgaggaacaccgcaattgactttaccaaagactattttcactgaaattaacagaagggaaaatgaaggattcaagagagaaaagaattgcacccaaggaatttcatctcttcaaatgagtttgagctatttttcactggaagaaaatttaagtagcaggccacaaaaaaacaaagtcagcccagtttccttgtatgatcaacttgtgaggacctcccaggctctttttctgcattctgactctgtatagacccaagtgcagtaaaatgccttaggaagttaacccaggaaagagaagtggtcctcattggtggaggggggtagggctgttcctaatcgcagaggttgcatggtggctcctctgaaggcaaaagcaggcatggctagcacctgtctcagctattgtcgccgtttggatcatatggctgtatacaactgcctttaccagcaatgtatggagatgcaaataacctactaatatcatcaggctggcctggtgactaacaaggctaagccttgaaaagtgccagaatgatttgatttgttttaataaaaactgacaatcatgtttacctggcattctttcagaaataaaccacaatgtttggtaatctccaaaaccagaaaagagcacagtcagactctgtactctcaagttggtcagattttcaggtcttgggagggttctgtaccaagcaaaggccacccttcccttgtgcatcccaatgcttcatgccatggtgcccttctcgtgaagtcagccctggctccttctacttaagaagaggggagaaaaacatggaagaggaagagaggggaacattgctattttttattttaatttcactattctttcacacacaaaacttacaaggacttaatccaccttggatattttaatttaaaaaaaaaattctgtctctacaccaatttggtttataaagattgaatgtttgggaaggtcaatggcgtcttttaaaatgtcttcccattttccaatgctatttcctcttccctctcacactattcttccccctttgctttctcttgcttccgtctctggaaggaacattggcttcatggctaagattttgatgcatgagcacatttcagtgttctcactctcccacagggttttatccttctggaatgtgtaaatcattttgaaagctcctttctgtgctacattgtgcttttgagattatctgctggggtgctccttacacagaaacacccgcaggctcagccacagacagggccctgtcttgggtcgtagaagggctgcctctactctgctcagcggcactcacttctggctgggaggactcaaatagtagtcagtgggggtgggtgggcccctgaaaacatagtcattgtgttcattgacaggcgttccaaccactgagactgagctcagccaacctccaggatggagctaattggtcttttgctctacaccctttctgacctcttcccttttcccaaggcaaagtctggtgctccttgcttccttgtttctcctttataggtctctaagaggaccagagagaactgagtggccccacgctcccatctcttcaccattgccccattactttcgggagagtaggaagtcctctgtgtttaccatccgagctatgagctccttcatgcttgtttttaattgagcacctcacatgagacagcttaaaagtgagacacttgctgtatggaggactcttaaaatcccccaggtagagaacaaaataaagaaaaagcacatgctggaattcttctcagggacagtgttgtagttgtaaaaatgcttaggaggagactatcatcacagtaatctttcagtgtaaatgaattcatctgtaagtgtcacactcgtctctacctgaagcatgtggctccttattttcaaagatggagttttttctaacacacagtgatttccagactcccggacatctagatcatttcctagattcctagtggcagttacctaaatatggtgacagctaatgttttcttgcttttttaagtaaaaatatctggaaccaccacttgatatatgatagcaatctcagagtccctcacctaatttctacaaaacattgtgtgtgatgcaagagaaaaggtgggacaatggaagactttggatttcttttctaccttatcctggattttactccccaccatgtgatgtctttttcttataccaaaccttcatccaattctctccactttccaaatggctcaaactgaaggccatgcttgtagcagcattaaatgaagccttcaagcccctgaggggaattatttagtaacccaaaaccaaattatatctctttattgttcagcttccttctcccaagagaaatgttagtatgccttccacccctggctttattgaaggtctaatagtctgatgctattaggggcctctcgcttcttcccagtagcttcccttctctctctagttacttgccccaaaccctcaaatccctgtggacacttttacaatagagtgatatttgcctgtgattcatttcacctaaaccattccgactggaagaataaataccacatcttcactcctactgtgttcctgaaggtcagctctccctcggattaattctgtccacagtacagcattgctagaagtttctcttaagcaaagctatcaacccatgagtctaacacagcctggtgttgtcccagctgctcatattttccctaggacagaaacagggcaaatctgtgggggggtgagacaggactcctgtggctttcatacaggaaaataaaatgctatccacccatgcaccacacaacagtatagcagtacgtcctcagaagagataagcagcagtctcacactgtggggctttggggatcagagattaaagggaagaataaggagcgagcaagacagatggtggggaggacatgacatactcgaccctgtgaaccaacatgctcttgagtagacccccaaagtcactgatccctttcttcctcctcttctcttttccttccttttctcttgcctcctcctcctgagcttcctcctcctcttcttcccactcttctccctcccttcccatttctccaactctaccctagaatccatgctatgatgaaaatgccttggtcttgacaccttgcattgctttcagacacagcaactggaggacaaagaagaaacctcacaacctggcagaggcaacagggtttttatgttgttttcctggaacttttttgactctgtgaatacaagttcaccctcttattgttttctcctcctgtactattaacccccactcgtagtattgtactaccattgtgacaactctatttctgaccatcactcccatatctccgtgtatttgtgaaatgctggctagctcagagacagggtacacagtggtggtcttccatggctgttcaccagccttgtagcccagaaccaacctaggaggttttacaatacagtcactctcctttgttaatttagcctccacctactacttcttgttcacagagatgttacaactgctatgtaattatctgaaaacctgtgagattcaggcatcatgaagaagagtgtgtgttccccttaaaaaactggagcttgcaattgtgaccatggtatctgtccaggtgatatacccctttttaccttttaaagtagttgatcatttcttctgtggcatcttccctaacacaaaactctcttgtgttgatactactgttggtaggaaatgatttttactgtcagcttatttatgatctgatccctatgagtctgaatgtcaattcctatgtcctcttcctttccactgtctccaagattgtccagctaatagctgaatgaagacctttgtcaccagtacctcactacttactctgagcattgacaatcatggctattcttctattgcttacctcaaccccaaatcagaaaattctatagaagaagaccttctccaagtcacctacacctacaccaacactcctctactaaactgtttatttacaggtcaggggacaaactagtcaaatgtgccatatgtataagtgtggacagatatctcaatggaactattctgaagaaacagaactgtgtctttgttgcattaaacaacctcacagttctgatgtgggaagtctgttctgaagtaggatattcacatcttacctcaatatcttcatttaaaaatattacttttgaaaaaaatattacttttgtttccaataattcaaagcttttctcagacattttcaaataaatatgcactattcaaaaaaaagcatttccaaatttcagaaatggagtgagggatatatttgctcaagttttcatatacagtgtatcttagaaatatgtatctcttattccctccatccaggataccccaggctctttcccccaacatgtctacatgtccttcctaacttaatatccttttgtaaaatcttctaagtccatgaaagcttcccatacgggtttgtgaatggagttgtgcactgaggcattggcaaacacatatgaccacatacatccccaccaatgaaaattatttttccctttatcaggagacaaaaactggcattaactcctcatctggaggtggggaatcaggagcctctccatgctggactttttaactctcttgatcttgtgaaggtcttatgtgagtaacacaggtactatgagttcatgtatgtaacagccatatcacgtttaaaaaccaaccttttatagcactctttccaatcttcaagctcttaccttctttccaccctcctctcctataatgtgccctgtgccctcagctgggtgatagatgacgtaaatgttccatcagtgaatgagcaactgagttgcttttcctcagcattttgaagttatgactctgcattaaccactgcccactgtaataagaagcttctctgaccaaggctgataacagcacaaatctatattatcataaatatttagaagagagcttgacaacatgaccatttagaaaaaaataacatcaatagactatccctctagggcctatggcttccctggccttgtggtttttactatgctctaaatattttacaaatatttcataagacatcttaacacattcttagtttaagctaactcattgctattcttcgtttccccattgcctacctccatccccacttaagcctttagctcccagtattccccctcaagctctttcgtatcagagatatagtaataaaaaagcattgtgctgtaactatagctacatgatctttaacaaagatcccccaaaatatataatgatgaaaagacagtatattctgcaaaaggtgctgagaaacatggttttcaatatgcaaagataaagctagatctttttctctcaccctgaaaaaaagctcaactgcaaatggatcacaagcctcaacataagacatgacgtgctataggaaaacatcaggagaacacttcaacttacatgcacaggcaaggaccttagtaggactccaacagcagagggaatcaaaccaaccaccaacaaacaaatgggaactccagaagctaaaatacttctactcagcaaaggaaattgacaatcaagtagagaggtagccaacagaacagaaaagtttagccacctgtacatctggcagaagattagtgcctaaaaatatacaaaaaaaattgaaactaaatgtcagcaaaacaaataattcaattaaagatcatctatggatgcaaaactaaagtactcaaagtaagaaatgcaaatggcctatatacacttaaaaaagaattcaacatccttagctatcatggaaatatgaattaaaaccatttaaaaatcccatctcattccagtctgaatagccatcatcaggtattcaaatgacaacaaatattgacttggatgtgataaatggaaactcttatacactgttggtgggagtgtaatctagtgcaccaacactggaaataagtctggaggtttctcaaaaatccagaaatagaattaccacatgacccagctataccactcctgagtatatactccaaggatttcatctttctatatagatcagtgtacattcattttcacttctgatctatttactgtatttaggaaatggaatcaactagatgtctttcaacagatgagtagataatagaaatgtgatacatatacatggtggaatagtactagctataaagaaatgtagaatcataaatttgcaagtaatgggatatttgcaagtatattttccttaggacactgaagcccccaaagacaaatgcctcgtgttctctctcatatgtgggtgctagcttctaattatgtgtgcttgacctagagtacacgtggaagtaaggaaataagtgacaggccaatgaaggggaaaatgcattgatgaagaagtgatagtagattctaggtgagatgaaagtatagatggggaatactgggagaagaaaggtacttcttttaaatataaattttataaaatatcttataaaataagaaacaatcttattttacatatcaatcccagtttcctctccctcccattgtctcatgccccccaccaacaccccattccacctccatccactccccagggagggagaagccttccatgggtatcatcaaagtctgtcacttcatttggggtggggcctaaggcttccctcatgtatctaggctgagagagtatccctccatggggaatgggctcccaaagtctattcgtgcactagggatactggttccattgccagaggccccatagactgcccaggcctcctaactgtcactcatgttcagggggcctagttcagtcctatgctggttccccagctgtcagactggggtctgtgaactccagctgtttctgtgggtctccccagcatggtcttgacccctttgctcatcatccctccctctctacaactggattccagaagttcagctcagtacttttatgtgggtctctgcttctagagccttcatcaaatagctgatggaagcagaaaggtacatcttaaagtcacttataattgactgtttgggactcaggagatggccccattgataaagcagttgccgaggaagagcaaaaacctgagtccagattccccaaaacccatttaaagccagacatggcagccaagcatacatgcataatcccagtcttcatacagcaatacgggacaggagaatccctggaagatgaccagctacctagcctggtttacatagcaatgaacaacaatggaccctctttcaaagttggaaggtaaacaccaacatgcaaagttatcctatgatctccatatgtgtattatggtacacacatgcaaggatatacataagtacatacaaacatacatacatacaaacaaacacacacacacacatacattcacagacagaaagattaaaaagtgattgttttatgttttatcaacagaaattattagttactatgactttcacaataaaatctatagaagttagaaacagacggcaagtgaggagagtcactggtgaaggagtccctcaaaagaaaatcatgccagattcttacagggaagttgatagataatgtatttttaaaactaatgccacattaaaaacatcagaatggactggcttagtaattgaaaatttactctttattactcgatttatactaaagactttgctttcattatatatggccctaactgtgctaagtgtgatcatagatcatgcataattctcacctctccaatctaagtatgctgatccaattctctatggttgctggctctatccatgaaaccagctcctctctaattgctatgatgataaaatgagttggtagaaaagatttatgcactgtttggaggaagaaccataaaagtgtttttcacttccacataccatgacacctgatagacaatgacataatggaaaaaaaagaacaacaagaaaaataggacagcagccagaagccattcagaaacacaggtttttaaatcatttaactcacaaaataactgaaaagaaaaaaatgtatttccatatgaggccccttttaaagaaatcagctatatgggcctgctttgtattgctctaaaataccactgactgggctgtttataaagaaaggagctcatgaccctggaggataagtctaagagcttgatatcaatacctgttgatgaccttcatgccacatcattgtacattggaataagagcgagagggtatgaggacgatggaacaaaaggggagtaaattttataataaagcactttggataactaaatcactcctaccaagagtactgacctactcacaatggcttttatctattttcaggtctcaccttccaatattacattaggcattaagtttccaacttgagggcccagaagtccaaagctggatcttacttgaatgtctcctccctgaggattagctttcatggtgccagagggggccatgaaagcctccaaatgatggaagcaaccaacaatttcaccctgctatgatgcctaggaactacaatgaccaacatggcatgataaccctaacgatgcaatagtggcacacataccttcaaggtagccaacagctctctaattagacttaagaaccactcttaacaagaaagagcctacaatttccactttactaagccagcataggatccaactacagtctacatattggtccttatacccacaggtaagtgtaattctcagctcacatcaaggaaacttctctttgcaatggagatcatcacagaaaaccacaaccgatcaaaatgctgagttgtggagtccagtcccagatgatacatctacaacacaagccctatatcattgtggaagaacaaggagaaaaaattgtcagagccagaggaaacagggagtttctctgtgagattgtgtcttctagaaatgttagtagctccacccatgaagtctcaccaacctggccacctaaacatgatgccaacaaaactagacatgtgaatatagaagtaggaaaattagtgaggtttcaaccctagacaaacagctacaggcatctacggactgctgatggaagaaatagtcttccacagggaaagtgaaaatggaaaggatgaggttatatttaatctcaaaaagtaaaaaatatttttgtttgtttgttgtttttgaaacagtatctctctatgtaatactggctacctagaccaggatgctttcaaattcacagagattctcctgactgcctcccaaatgctgggattaaaggcatgtaccaccacatcacttgaattgtgagatatattcgcattatatatccttactctcaaattttctaggaagttcttttctgtttttttccatgcatatatttcatgttctgctgtgttgggtgttttttttctagtttctttctggtatgatagaacattaaccaaaaccaacttggaaagaagaaggtttgtttcagtttacattcacagttaatcactggggaagccaaggcataaacttgaggaaataacttaaagacaggaactgaagcagagatcgcagaggaacactgcttactggctcactcccaggcttccatgcagctacccttttgtacagcccagacacaactgcccagggacagcaactctcagtgggttgagccctcctgtatcaattagtaatcaataaaatgcctctctcagacatgcccataggtcaatctgatggaggcaattcctaggttccctcttcctagatgtgtcaagctgacacccaaaattagtcatcacaataatagtagagagcttttaggattattttgttttgtgactttactaaaatatatactgtctcagaaaagcaatatgtcataaatactacaccagaagcaatatacaggttcaattcataccccatcaaattttcttttttttccagatgtcagataaatctttattagttgttctggaggccaaagaggcctaaaaatgggtttgttcaattgctattaatttctcaccggaatgcttgataagatcctacagttgatgatactacaaatatttatttcaagatataaagagatcaaatggaactgagctggagaattcctttttctggctagcttttcttttttccccccatcaaattttctttagtcctataataaaaaataatagtcttgatgtttatatggaagtgcaaaagactccagattatcaaagtaatcacaagaaaaaaaaaagagtgctggggtattgccagatttcattacattatagaactaccataatgaaaataacacaatatgggacacaaacacagatatgtcaatcaatggaatcaaataaaatgctcatttataagcccacacagctatagacacctgattttttctgttttttatttaatttttacaaaattataatttcacatgtcaatccctactccctctcccccaacccccacctgcgccccctgctccctgtgaagagccctaccctccataggggctccccaaattccacaaaatcatcctaggcccgaccaaggccctcctccatgtgtccaggcccagagagcatcccttcacgtgggatgggctctcaaagtcccttcttacaccagggaaaaatactaatccactaccagaggccccatagggtgccaaggcctcctcattgacatccactttcaggggtctggatcagtcagtcccatgatggcctgccagacagcagtctggggtccatgtgctctccccaccccgttcaggtcagctgtctctgtgggattcaccagcctggtcctgacacccttgatttcatttctccctctctgcaactgggttccagagttcaattcagtgtaaagctgtgggtgtctgcctctgcttccatcagccactggacgagggttctaggataacatacaaagtagacatcagtctcattataggggaagggcatttagggtatcctctctaccattgcctagattgtcagttggtagactgatttttgatgaagaccaaaaaaaaaaaaaaaaaaaacattggataaaagatgatctctttgaataatgtttcagaaacaaggaattccacacagagactgatgaactagatccctatctctcaccctgtacaaacataaactccaaatggatcaaaggccttaatacaagatctgaaatggttagagaaaaaagcatggaaaatactttaagatatagacataggtaaggatgttgtgaaaattactctaatcacttagggtagtaatggcgacaattgacaaattgggtttgtgaaattaaaaggtttctacatagcaaaggagagaattaagagaagatgcagcttacagaatggaggcaaatctttgctaactataggtacatctaagagaggattagctcaaaaaactatataatgagaaagcaaagaactcaatcaataagcaggttaatgaatgaacacagttctcaatgagtgaaattctaatatccatatgaaaaagtggtacaacttacttgctatcagagaaaacaaaaattacagttaaactgagattctaccacattctaattagaacaaccgtcattaagaaaacaaattttaaaaaaagctaatgctatcgaggatgtggagaaaaggaaacccttctggtgaggacatgaagtagtccagccactatggaagtcaatgttgaggtttctcaaaaaaactgaaagtagatctatgatgagactcggctataactcccctgggtatttccaggaaagacccaatgcccacagagcacggagcatattgatacactattcacagtaggtaaggtatggaaccaacctagctgtgtttcagcagatggatgcataaagaaaacatggtccataggaaaatagacaggatagaaactttttgaaccataaagaaggagatatcactgtactgtcatttgcaagaaaatggatgcaaatggggttagttttttaagcaaattaagccagcctcagaaagacatttgttctcctatttgtgaatcctagattttgtacagaaacacaaaaccatgtatgactgtgcagcatgaaagcagaactaaaacggtttactaaaatgagagggccaacacaggaaagaggaggagagggaagagagaaggaagggaaaaggagaaatagggaaggaagaagtagagagggagaggggagggagggtgggggttatgcccaaagtaccttgtgtgaaaatttctttatggaatcatatatatatatataatatatattccatatatatatatatatatatatatatatatatatatatatatatatatgcaaagcactagttgtcaggtgtattttctcttcattccataatgccttttgtatttaagggactgctttcttttcccttcgctgagaagggtgagagtggggtggggtaacattctgagaaatccatccagaggaaagaaacattattaggaacttctgaaattccaggttgggaaggctccttcaatatctggcatctcttcatttttgccgtgtatcttctcactttctgtattacagctccctaaagctttgggcaggccagagctgggcctgagagccttagacatgttgtgaggcctttgaaagtcatgccaccaagatccattcctcccaacttgagggtggaagtccctgatatggagtacattccttcccccagaaggaggatctcctaggaaagggcccctccccttgccatcaagccttcttgtattgtaagctcataaccctgttgggttccttatggaccaacgtgttagttgggtttttccagagaaatagaaccaatggagtatatataattataacaagagatttattatgttggctcacacagcctgaggctgaacagtcccataatggccatctgtaggctagggaaaggaaaatctgtagctgcttggtccaagaaacagaaaacctcagaatgagaaataaggacaatgatacaagacaggtcagggcccgagggccaaagcacctcttgggcagcaatgagaaatacacacatgggaaggaaaagcaagagagaaagaaagataaaatgtgtttcctctgtcttctgcttttcctttacggctcagctctgaacctaaggcatggtgcagcccacatctgcatgtcccccctccaccccaccccacacaaagctcatcaccaagacaatcttgcagacacattcagaagtatgctttatcaacttcttaggcatctctcaatgcagtcaaactgacccatgaaattaaccatcccaaatactatcaatttacatgtcctctgacctgccacagagggatgcagaaaggtgaaaatggggcaaagggaatcgtactgagcaggacagtagcacagtgatgggcaggcagatggtgatcacacatcttccgtcctattctagaagcagtggttattttccactgtccatggaaaccctttctaccctcctcgcacccactcttccatcagtccaggcaccaaaaggaaagggtttgcccatatttttttacataaattctcacaagagcaagtacaccataagccacatggaaggttaacgtcagaagtggggagcagaagagctggtggtgaagatggacaatccattactgttgcttgcagtaggtcagctgtgggtcaggtcttaaaataaatgccaaagcctttgttttttttgttttttttttttttacaaaataagattctgtgttataagtccaaaaggtagggtgtctggagttgaaagacccagcttcaggtcctcactctgtactcactgacacttcttactgaatggaatgttttgaattccacctcattggccgtgagaggacatttttggtccctttgcccacttattttgtgtatactcctagtgaaaatgttattttacattgttttcaccaacacagttcaccctactccagctgttctttctgtgtccctaaagttcccatttcatttctgttgccatgatagaactccctaaccaaaagcaactttaagggggaaagggtttactgagcttgcaatttcaggttccatacagtccactgttgcagggaagtcacggggcagcagattgacatctggttcacatcacatccattttcaagagcagagaaaaatcaatacaaccctgctgcctgcctgcttgctgtcctctagatttcttctgtggttatacaatcaagggcccagaccatgaaatggtacagctcaaattctgagtgggtctccccacctcagtgagcaatccaaacaatccccacaagctaacctagataatttctcattaagactctcttcccaggtgattctaggttgtattaagtggacatttaaaactaacaggcacaccaatttagaacattaactccttaggcttttgttacccattctatcatttggtcatctctggaattaagaatggaattcctcattattgtgttctgctcctgtgacagtgctttgtagaaaatgtgctggataatcccttgctttgtggccgtgtgcttcctagtccaaaactccattcttgcacttcttttcttgttttctataactagacacacttactgtcttaaaaccttggtgctggtgaaacaaaatacccaagactgaggaattggaaaccatagatgtatttctcatagcgctgaagactgagaagtccaaaactcaaagctgggtcagtgctcactgaggactctgtttccacatttggatagtgcttttctctatatatatatatatatagatagagaggacgaaaaggttgtcaagagatggaaaggttacaagggtcctagcagcccttttatgtggttactaatcccatttatgagggttcagtcttcaggacttaattacctccataaggattcatcatttaatacattcccatgtgggcttaagctgcaaacatgaattttggagggggcaaacatctaaaccacagtacctgctgtgttttgttctgtgccctttgcatttggccctcacctaaagccaagtgtagagtattaagcaaatccacagtggcaagcccacatgggtctctgcttctgctttgctcaggtttcctgcaagccaactcttcagctgctttaagacctcacttggccccagtgttgatttagtcatttgcactgattaatcccttagcaacacagaaccagaaggagtagagattttcacgaaagggcatggagttgtacagaaaagcacccctccctttacttgaatatagtcttgaaatttcccgagaaacatttaaaaaaaatagagttatgtgccatatgcaattaacaattgggacatttcttaattatccttttggctacgtgacaagtaacaccactcaacttgcagttttagattttcaattgtactgcggtaaaaggtttagcctcttttgtgttgggctccaaatatccaaatgtctaacagcctactttctcaacccctatttcttccacaatggagacagtgactagatatgaaaataccaaacaccagtgaaataaaaactggattgagtggagcaactatctctgaaaatgagagcaggaagcaggaaggaactggaaatgcaagtaaggggaggatatcaggtgaatctagccctttagaaattcatctttgaagggaacaggaatttcagacagtatagaaatatggactggggaaagcaggtatcattcctcaaggtcttactgaagaaggtgggcactgtgctactcaatagctgtcagcattacttcgtttaatgtttaaaatttagagtgtatgttggttagtccttcgccagtttgaccccaacctagacatatctgggaagaagggatcttaattgagaaaatacttcctttagattatcctgtagccaaatctgtggtgcaccttttggatggatgattgacatgggaatgtccatcccacaggtggcagaaccacctctgggcaggtggtcctggattatataagaaagatggctgagcaagccatgaagaacgagccaggaatcagcattcctccatggcctctttttgagtttctgccctgaagtccttcatcaacagagtatgaactgggaattgtaaactgaaataaacccttccctccccaagttgcttttgcttattgtgttttatcacagcagtcgaaaccctaagaaaagggatgtggcactttacaacagtcttcaaatttgatccttaaagcactttatgatgtgtgtaatcatatagggttagctgcaagtgtgtgtgtgcatgcacatgtaggtaaatatgagcgagcttttgtgtaggtaccacatggacatcgttatctttatcagtctttctctgccttattatttgagacagagtctcacactgaatccagagtttctcatttcagctatgcacccttcctcctctacttccccagtcctaggagtacagacacacatcgccacacctggctttttattaagtgctggggatctaaactgaagtcctcatgcttaaatagcaagcatattagcaatggagttttcactgtagcacctattatgtgcatttttatctcagctttggggttaatggtagaaaaaaaataactcctttgcttcaagacacagttgttcattgaaaagacgagaactgacactaagatccaccagctcacaggaaactgttgtgtgcttttcactgtttcccagccttgttaggcctcatacgctgcattgaggtctcatagctttgagccaatctggtctcttcctgaatatctgttctgtaaaagggtttttcttaaataacattggtatgcctcccatgaagtcctatattctaagttcatctctatcttggcaatatatcagaatctcccatttcctagtctgtctccttgaaattatcaacccttctgcaagaggactacttcagcaacccagggcctagcactgttcttggtatcatccatatttcaatgagctacttatcaagctgaagcatttaaaggacatgtttgtagctgcttcttcatgatatggtgagttgttagcaagtgtctactgctctctaggtctatgaagtatccagtttcttatctggtatgttttgggtttatttaaggagctcctacttccctgctagtgaattttgtatttccctgtgtagtatgagtaataaaaacccagagataggcattggggttcaagttgaagatcagaaaagcaaagcagccagccagtagctcttacctctaccaaggctgaaatggagatactgtcttccctgtgattggaaactaaatctctcatgagactctgcttcttccttaaatatctctctagtgctggaattaaaggcaggaactctgttactcttttagactgattcacttatgtatccctgggtgaccttgacctcaaagagatccatctgtttctgtctcctgagtcctgagattaaaggtatatgccaccactgcccagattctatgactaactagtgtgtctagcttcacattctgatccctaggcaagctttattaaatcataaacaatatatcaccatgtccctacatgatctttttctttcctttcttttttccaggtatgagttgtcgtatggcaaagctctcagtgtgctagatgacagcagcattcctcctgtgacatagaaatagagtagaaaaagcagatgaacaatacatgaagtcacctgtgaaagtgaacctttgagagacagcattacttagaggtcaagaacaaggttctgcaatcagactaccagttataatcatgcctgtgcctatcccacactctggatgttctaacctctccaggcatctcctcccaagatgtcaaaatagaataatggtagttatctaatgaataaggtaccattttcctccagtgttatagctgcattttagaaagattaggtaaactgacatttagttaataagtactaaagctatatgcctctcttagttagggtttctattctatgacgaggcagcatgaccacagcaactcttaacaaatgaaaaacatttatttgaggtggctcacagttcagaggttcagtccattatcatcatggtgggacatggtggcgtgcaggcaggcatggtgctggctacatcttgatcagaaggcaatagtagtagtctgtgacactgggcaatatcttgagcacagaagatctcaaatcctgcccccacagtaacacacttctccaccaaggccatccctactccaacaaggccatacctctaatagtgcccctccctataagattataggagccaattacattcaaactaccacattccacttcctggccaccataagcttgtaataatatcataattcaaaatgaatttagtctggcttcagaagtccccaaagtctatcactgtctcaacaatgtttaaaagtctaaagttcaaagtctcttttgagattcatgcaatctctgaaccataatcctctataaaatcaaaataaaaaagaatatcgcatactttccatatataatggcacaggatatacatcaccattccaaaacacaggaaagggaacatggcaagaaaatacttggccgaaacaagactgaaaattatctgggcaaactccaaactctgcatctccatgtttgatgttaaaacactcttcagatctccaactctgttcagctttgttgactacaacacacttctttctcttggtctgattccactccctgttagcagctctcctcagcaggtatcccatgactctggcacataggagtttatacaaacacctacctattatcaaagtttgatttctttggctagtgagatggctctgtgggcaaatgttcttgccacctaagcctagtgtcacacacacacacacacacacacacacacacacacacacacacacacacaccatcacacaaacacatcacaataataaaaatttttaaacttcaattctcaaaggtatattgcatacaggtatcaaaccaggcaacagggctagaaaaatgactaaaatacactgacatctgcctaatatagaagtagacgtgttcaacaattaatcacatagttacaacaaggtatgataaaatttgtgaaaaagaaatatggaatgccctggtaatacatatcggtgggctctaagtaatggaaagtacaaccaggagaaacagagtgaaagcttgaaatctgaagacctcaaatctgcaggcctggatgcagattttcccagaggactgggaaaagaagaccaaaaggtatatcccaggcagtggaaacagcagcagttaactaataaaataatctgagttgcaaagtgtttaatagagctaagacttaaaattcacaggacattgacaggagagcaaagtggaaagacaatgttaatcacatgatgaatgactttataatccattctgaagggtgtgtatcctaaagatgatgaagagtgcttatgtgtcttcaagtaaagtgatggcatgatttaatttctcattcagaaagctcacctgctagcataagggttgacagattataaagagagaagattggctgagaaggcagtgtgggactgcagaagacaggtgatggtggactaggcaggggagaaggattagttgatggggagaaactgacagatctgaaaaatttgtgggagggaagattgacaaattttggtgatggattaaatgtgaaagttgaggaagtcaaagatgatcctgaaattttttaacttaggcaacttggtgaacagttaaccaatgcaaggaattctgaaagaagtgactagggtatgaaaagggagacaatgatttggatttgggccttttaaggttaaaatgctttggagttatataaatggagataaactagaagcaggtagacttacggatctagaattgagaagagtgatactgagttaatggtatagaaaccataaatatatagaagtcaattttcaaaatagaaactaattgggttcatcgaagagaatatgctgggaagaaatctccttatggtaaaatgctgagaatagttgatgagctaggcctctgcacagtaatgtgagggcatcccaaggatgaaatgaattatcatgagactaacgtatgggagaaggtggatctttgcacctgtttctaagttttgaatgactggcaggtactaaatatccccttgtagatgaaaacaggagctgagaaccaatacaacctttaactaaaattagacaagagatctttgcagctgttttacagaggagagggcaagtgtttcactcatctggacttatcttccatgccatagagtcaaatagagatcagggcagctggtagcccctaaccatcatgcaaagtagctgcccaagtgcatagctgaaagtcttttcactcagccagttttctctcatgcccatcatttttataaatctctctcaaaactgaaggatggaagtgaaagggtgcagaaagaagagtagggcattctaggactagatgaactgtggagatgtaaaacccaatgtcaacactgatgttgcatgacagatggcagctatgatatgttccatgttgctgtggccagaaaattaaagtactgtcttacatacctgcaccaatagcctgagtgtcacagcatggaaatttaagcatagggcactctaagcttctagtcccaaccctacagagatgttaaaagcttagttattataatacaaaataaagactgaggacttgatcctcaaagtgacataagaaaatctgaaggtcctcagcaccagtaactattcctttcctaaactctgctgtctttggagttatcttgccaggaaaaggcagtaccttcggagaatgtgagtaaatagtgtctggtggcattcttgatactcttaaatcaatggcatatctggaaaaatgacgtattttgaagatgattgctaacatttctgtcctgctgtctctctcagactttgataagaatcacccttcctcctcccagtcaagcacagcaatgacatccttctatttactcccacaggacaataaagagccacatcatgagcatctgggggcagccttggagtttgttatgtcttgtatgcatcctccagagagtcatgtattaaaggcttgaccctctcggtctgtgaaatcattaagaagtggtgggacctttaagagataaatcctaaatggaagtctcctagtactaaggtatgtgccttgggtcttcatcccaccttgtcccttcctctaccataagctccctaacataacatactgtcttcctgtagacccaaaacaagcaagcaaccgatcataaacaacatctccaaatctataagccaaagtagacttttctacttttagaattatctgctagaataatggaaagcgcactagcagtataattctgcagtgataagagagtcccgcccattcatttctttcatttttctgaagccagaaatctattcatagctaagaggtaattctgtgaaaggagttttctggtatcttatttccatgtttgataattctgtggaatagactcagacatctgaacccagaaaacaagtaaaaaaggaaatcgggggagaggggactatgaaggccaacactccagattctgtcctgcgtctttgaggcccacagtggcacaagagcctcatcaggaggttctctgcttttgccacacatgccttccactaagtaagaaaggtacctatctaattattcaccccttatgtaggccactgggccctcagtctaacaggtttcaactcagcccacctttaaaattcttcagagccattcagaccatggaaatcaagggttaacccattttatagtcacagcatagccttcctctgacaactttatataattcatcccattcctggagacaagcaccctgtggtccttctacctggctctgaatgtatgtcactaagatgctgctgctgacctcatctgaccagtgacagatggtgtttgactattttgtaccactaaaggaggcagacttctccttcaccaaaggatactagggagtgaccagaacacaagggagagggcatgacaacagcatatgaatatcttgtgattaagagggctgtgccaattatgttgacttgagacagcttgcaggttcttctctcaagggtggtgaccaggtaagagaaacttgcaaggaagattgtgaacatcttccaggatgagaatctgaggagggcagagatcttctttatcatgtcaagtaactggaactgtctagaaggtttggaagtactctccatagaacccacatatgtacaaaggttagcatttaaataccttccccagacaaaagtcatatccacgtgtcaataactatgtcaatatgccagtgccagtgttcatgtaccagagtcaaagcgtcaatgacagcaagtgagtgtgtgatcacccctcctgggagactctaacaagcttataaacttactatcagacgtttttctccctttacccacctcaagaagattaaataatagactccctcttctctatcattatccccaaacccaacagcagacaaaaagaaaatcaatagaacggcactgtgtaaggtagcagacagagttaggaaaagaaaaccaaaactttcaataattgaaagaaaaagacacatcatggcaaccgtccgatgtagcagtaagacacaggaagtagaaattcttctgagcctggttggaaacagaaactggagagagaaaatcaaactgtttatacccacccaactgtgttaaaagtgatcaataagctgattactcggaaatagattttgtaaaaattgtttggttctcaacagattcatctaataacacataagatttagttttccagccttcaaaagtgatggctttatggacattttcaaaattgtgttaggcatccatgcagggaaccagccccatcaacttacaggtctcaataagcatttgttagatctgaacaactgtgcagatgaggctaagccttagctgcaaaggataagagcaagctatgagtaaggccggggcatcaactttcctgaaacaaagctttgcctatacatgcacaactccttcactctcacataggtgagcaaagattggtgcatcaacctctggaccagggaggcagacatggaggaaatgctaaattgatctgattattccagatttgccctctgattatatgataaatacaataagccacttgccaagacttagcacttaacataccccctccattcacttttgagaactattttattaattctttaagaatataatacaatgcattttgatcttcactcttaattcctcccagacctgatccggccattccctattgcccttcaccaactatttttttttttattcagtaactctcgacttgctccattttgtgctgtctatagacttctgtgtatgggatcgtctcctggaatgtgataaacagaccagaaaccatggccttgaagaaaactgattctccactcacaagaagtcaccaactgcccctagtttctcagttaggggaggggttcatgagcccctctctgactccatgtagaatgcagccacagctatgagttcatgagtacagcagtcctgtaggggtcagaagacacattttagtcttttcttgatgcctctttcttatcctgaacctaatgctgactcccattttcaggccccttgagttaattgaaaatctccaaaccctctacctctgtaaaatgtttaagattccagtttcacaagtcagaaggtaaataatgaagccctcactgagacctatcaagaatgctgacatcatcacgtgacgagtaaaaaaggtagctttccccatcttcacccaagccttgtgtttttctgtctcccaatacagtggttacatctactaggctctttaagtatttgcaagagagtggtctgtcagcttcctacttaattaatattcacagtaaaaagcaaatgtagacttctaaatttagaagggtggttcttatgcagctgagataatcgggcccctaagaaccttggaagtgttgacttcctgttcgtatcaatttaggagatgaccaccatgcttcacttggggatgtgtgttgtcacatggttacgggatggcttgtcttccttgagcttgagtctctcaccactcctccctgggctcttattcttcttgggggtgagggttggggtggatgaagcgtatggagcagagaacacaaagataaacaaaatatgacagcatataattatttaaccacacatgaatatatttagccctttattttctgtaatggaaagattgaactataaaaaatttaaatttcttctctattattaatgacttggcatctgctttacaggattttggacttctgttctatgggacaaaaattgtaggaagtgcagagggcagaaaaggcccaaagacaaatagaaggctgtgaatatcaagatgtggagaaaagggaaagccaagtactgagggatggactaataactgggggtttccctgaggccatgatgtatgaagaaagaacatagctccttctctgaaaccaggactatgattggcagagctggtaattgcctggagccacggcctttggggagccatggcttccgatcctgagaacctaactctttccaccatatgaggctgtggttatcagttccaagaccactgtgtgctcagcctgtactgattttttttttcagatttttttacttgaattagaaacaacattgttttacatgataatcccagttcccttctccctcccatcctcccctaccaccgccccccaactaaaaccctacctctcacatatcctttctgcttcccctggatggtaagtccttccatagggtgtcatcggagtctatcatatctttggggtagggcctaggcccacccccttttgtcttggctcagggattattactctatgtgtaaagggttcccaaagtccacacctatgctagggataagtactgaactactacaggaagtcctgtagatttctgaggtttcctaaatgaaatccatgttcctggggtctggatcagtccaatgctggtatcctagctatcagactggggagcaagagttcaccaatgttgaggtcagctgtatctgtgggtttcaccagcttggtctggaccccttgtccttctctgcatctgggttccagttcagttcagtgataaatagtgggtgtctgcttctacttccaccagctgctggatgagggctatcaggtggcaaataagtcagtcatcaatctcattatcaggggagggcatttaaggtagcctctcctctgttgcttagattgttagctggtgtcatcttggtagatctccatacatttccttagtgcctgatttctttgtaaacctaaaatgtctccctctattatggtatctccattcttgttatcttctattcttcccatgactcaacctttctgctccttcatgtcctctacatccttcccttctcaatctcctagttcccaagcgcccccccccccgccccgtcccgtgctctcaatttgctcaggggatcttgacccattaccctactccaggggaccatttatgtctctcttagggtcctccttgtttactagcttctctggcagtgtggatttgtaggctggtaatcctttattctgtatctaaaatccacatatgagtgagtacataccatgtttgtctttttgtgattgggttacctccctcagaatggtttcttctagttccatccattagcctgcaaatttcaagattccattgtttttttctgctgagaactactccattgtgtaaatgtaccacattttctctatccattcttcagttgagggacatctaggctgcttccagtttctggctattacaaattgtaatgaactgctatgaacatcgttgaacacatgtctttgttgtatgaatgtgcttctttggggtatatacctaggagtggaattgctggatcttgtggtagactgattcccattttcttgaggagtcaccatactgatttccaaagtggctgtatgagttggcactctcaccagcagtagaggagtgttccccttcctccacaacctctccagcataaactgtcattggtgtttttgattttagccattctgacaggagtaagatggtatctcagagttgttttgatttgtatttccctgatggctaaggatgttgaacactttcttaagtgtctttcagccattttagattcctcttttgagaattgtctatttagttctgtaccccactttttaattggattgtttggtgttttggagactagcttcttgagttctttgtacattttggagatcagccctctgtctgatgtgggattggtgaatatcttttcccagtctgtaggcttctgttttgtcttactgactgtgtcctttgccttacagaagcttctcaatttcaggaggtcccatttatcaattgttgatctcagtgtctgtgttactggtgtaatgttagaaagcagtcacctgtaccaattaattcaagggtatttcccactttgtcttctaatagggttagtgtggctgggtttatgttgaggtctttgatacattttgacttaagttttgtgcatggccataagcttgggtctatctgtactcttctacatgtccacatccaggtatgccagcaccatttgttgaagatgttctctttgttccatcatataaatttggattgtttgtcaaaaatcaggagtatgttatgataaatctttccaccaaaagccgccaagccccacagccacgtgtgctgtctatgccagccgctcgcccaagttagggccccaattaatgcacagagagacttgtattaggtacaatgctgcttggctaatgactaggatttctcatctgttagctcagtctcaattatcataaatctatatattttataagacttatcttatccgacgccttattggcatccctccttgcctgtggataacattgcaccactggaggaagagcagaggggaaaagggacacttcctgtttctcattgctcaaatatgagtctccttgctatgtcacttccggcctggatcaccacttctctactacatttcccagaatcctctttgactcctagtcctgtctaacttgctgtttcattggccaaacagaactttatttaactaccaataagataaacatacacagaagtacttcccccatcatttgtaggtgtctgggttaagatcaaggttttcaactctattccactggcctacctgtctatttttgtgccaataccaagctgttttcaggtctatagctctgtaatagagcttgaagtcagggatggtgatgcctccagaagttcctttattatacagggttgttttggctatcctgggccttttgtttctccatataaagttaagaattgttctttcaaggtctgtgaagaattgtgttgggattttgatggggaatgcattgaatctatagattgcttttgacaagattgccatttttactacgttgatcctacctatccaagaacatgggagatctttccattttctggtatcttctttaatttctttctttagagactcaaaattcttaaggtacaggtctttcacttttttggttaatgttaccccaaggtactttatgttgtttgtggcaattgtaaaggatgatgtttctctgttttctttctccaccaatgtgtcatctgtatatagtagagctacagatttttttgagttaatcttgcatcctgccattttgctgaaggtgataatcagcaaaatggtagtcttttgggtcacttatgtagactatcatatcatctgcaaatagtgagagcttgacttctttctttccaatttgtattcccttgatctccttttgttgtcttattgctctagctagaacttcaaggacaatattgaagaggtatggagagagtggacagccttttcttgtccccgattttagaggaattgcattgagtttctctccatttaatttgatgttggctgtcggcatgctgtatattgcttctattatgttaaggtatgttcctgttatccctgatttctccaagacctttatcatgaaggggtgttggatttttgtcaaaagctttttttggcatctagtgagatgatcatgtgtttttttttttttcctcactctgtttatatggtggattacattgatggattttcttaggttgaaccatccttgcatccctgggatgaagcctacttgatcatggtggatctgatgtgttcttggatttgatttgccagtatttgattgataatttttgcatcaatgttcatgagggatattggtttatagttttctttcttagttgtgtctgtgtgtggcttgggtatcaaggttattgaagcctcataacaaagagtttggcaatgacccttctgcttctattgtgtggaatactttgaggagaattggtattagctgtaccttaaatttctggtagaattctgcactgaagccatctggccctgggctttttttggttgggagacttctgatgactgcttctatgtcactagggattataggtctatttaagttgcttatccattcttgatttaattttgttaagtaaaatctgtttagaaaattgtccatttcctttagattttccaattgtgaggaatataggttttgcaaatatgaactgatgattttctggatttgctgtgtctgttgttacgttccccttttcattcctgattttattgatttgcatgtttactctctgctgtttgctaagtttggataaaggtttgtctatcatgtttattttcttgaagaaccaactcttcattatattgattctttgtattgttctcctagtttccattttattgatttcagccctcaatttgattatttcctggcctgtgctcctctgggatgtattggtttctttgtgttctaaagttttcagttgtgctgttaattctctagtgtgattattctcctgtttcttcatgtgggcccttagcgctatgaactttcctcttagcattgctttcaaagtgtcccattggtttgggtatgttgtgtctacattctcattgaattctaggaaatctttaatttcttttttatttttcctcaacccaggaattgtgcaattgggtgctacttaatttccatgagtttgtaggttttctgtagtttgtgttgttgttgaattctaactttaaagcatggtggtctgataagatacaggggtttatttcaatttttgtacctgttgaggtttgctatgttgccaagtatgtggtcaattttagagaaggttccatgtggtgctgagaagaaggtaaattgttttgtatttggatggaatgttctatagatatctgttaagtccaattgtgccatagcttctattagttcctttgtttctttgttaaatttctgtctggtgtttctgtccagtggtgagagtggggtgttgaagtctcccactataagtgtgtgcgattttatgtgtgatttgagttttagtaatgtttcttttacaaacatggatgcctttgtatttgaggcataaatgttcagaattgagacttcatcctgatggatttctcctgtgatgattaggaagtgacccccttcatctcttttgattgattttagtttaaagtgcaatttttttaatattaggattgctaccccccccacttgtttcttgggtccatttgattggcaaatcttttcccaacctttaattcttaggtaccatctgtctttgaagttgaagtatgtttcttgtatacagcagaaggatggattctgtcttcttatccattctgctaatctgtgtctttttgttggtggtggtggtggtggtttttcgagacagggtttctctgtgtagcttcagagcctttcctggcacttgctctggaaagcaggctggccttgtactcacagagatccccctgcctctgtctctcgagtgctgggattaaaggcgagagccaccaaccctctgctatctgtgtcattttataggcaagttaagaccattaatgttgagggatattaatgaccattgactgtccattcttatttgtttttgatttggtgatggtggtgagattatgtgtgggattctatccctttttccttttggctgttggtaaagtgggattatctattgcctatatttttctggttgtagttaacttccttgggttgcagtttttcttccagaactttctgtagggttggattggtaggtatgtattgtttgaatctggttttgtcatggcatatcttgttttctccatctatattgattgaaaacgttgctgggtatagtagtctgtgctggcatccatggtctcttggtgtaggtagaatatctatccaggaccttctggctttcagagtttccatggaaaagtcatgtgtaattctgataggtttgcctttataagttacttgacctttttcctttgctgctcttaatattttctctttattcagtatgtttgttttttttttttttttgattattgtgtggcaggagacgtttttttggttcagtctatttggtgttctgtaggcttcttgtattttcattggcatgtctttctttaggtcaggaaagttttcttctgtgattttgttgaatatgttttctgtgcctttgagttggatttcttctatacctattattcttagatttggtcttttcatggtatcccaaatttcctggatattttgtgttagggatttgttggacttaagattttctttggttgatgaatctatttctgctattgtgtcttcaactcatgagattctctcttccatctcttttattctgttggttatgcttacgtgtagttcctgatcatttacccagcttttctatttccagcattccctcagattgtgctttctttattgtctctatttcagattttaggtcttgaactgtttccttgagagatttgttgatatcttgtattttggggtttgtttttcttccatttctttaagggattttctcatatcctctttgaggccctctatcattttcataaagatgtttttaaggtcattctcttcttgttcatctgcattgtgatgttcaggtcttgctggtgtatggttcctagtctccagtggtgtcatattggattttctgttgttgatgtgcttttacattgtcctcttctcatcctttcttctggtgggtgtagaaggagtctcttcctctcctggtgggtatgggaccaaggttcccttcgtcagagtatttgatgtctgtcctccttgtggatggaggtggcactgttaccgggttctcggcagtgtccaggtgtgttggatcccgctttggagttcagatctggtgagcagacccctggtgtcagatgtctctgagcagggcagctgaacctgaaacagaaacagcccctggcctaccctggccagtggatggaggcggaactgttaccggggcctcggcagtgtcctggtgtgttgtgtcctgctgatgtgttcggatctggtgagcagatccctctcctgtactgttcttaagacaccctgtgctctggtaacacattgcttaattagcttcctgctcgcttcatcccattgtatggcagattctgctgactttgtcccacattgtacttcttaataaacttgcttaagaataagacacagtttgttgaagaccccccccccagttccagggtttcttatcttctctgtcttctatcctctttatcttctgacctcatggtctctccctcaggattctgtcactgaaaaccaccttactggtccagggcaccaagccaattcatagaaggataacaggggatggaaggtatggtttgcacatattgttgggcccaggtaccttccaccggagtgaaaacttcacatgcttcatatagagggttcagcaaagtgatctttccaacctcacctagtgaggggttttaatcccacaacacctgtctgtacctgctagccagcaacaggacccaatttatgctttggatttgcagaagagtattctatcatatctatttcactcatcccctgctgatggccatttagtttgacattgatcatttttgattaccagccacaatgaagtgaataaatttcttcatatgctaacccatatatgtgtacaatttttttaaaagttaatatatccaaacacacaatgctcatagaaaccataaggcacaggtaagtataaaacaatctcatgaacctgaaaaatgtatgcacatgaaaccaacacatttcaagagtacatgtgaatatagatgcacactatctataatagaatgattgtggaatggtgtaagaaagctaagtcatctgtattacaatgggaagttgatggattacttaaatttaataaatcaagatgagaaactgaacagaaataagaagtaaataccggcagacaaagccaaatgaatttcctctaagaagcagggcccagagataaggaagtctagagcctgcttgttcctcagaatctctttaatactccatgggatacactgccttagtaaaaataaaattgagaagtaaaagcaataaaaactcagaactaaataagtatccctaagggggactgtggaaaataatagattagtattttgaattccaaatctaaagaaaatttaaaggatatatattcataattaaatattcttctagaattacattaccacaggtagtgagaccacccttgtcctcatatcctccccaatattaaaattaaacttcttcaaagtcttcatgagaggtgtttgaagaaagtcagtgcctgtttcttcttatggtacctcaggcatatcaccaaacatgtttacaaaaaggaaacccactgggtaaacccacacaatttggaaagttagtacaagataaaaatgtcagttttgctgttcaacattatacaactgtgcagtaagcactggcattgtgcccagtcaaatgagtgccttctgaaccctgtgtctgaggccacagcttcatgaagcctgctttgaacatgcatagatattctgttactgaatttgtacatgtaaggaactggagtcctcacttttccagaaagcctcaggtgtctgccatcagagttctgaagaagtgcaatttgggagactttggtctaaatctaccagagccagaaaagcagtaagggttatatgttatcaaaaacaagttgtggagctggggagatgactcagtgagtaaagtgttttccacacaagcagagaaacctcgatccatgtaaaagccaggtaacatatgttcttataaccctagttctggagggaaagagacaaaaggatccctggggcttgcgtgctagccatgctggccactctagccaaaatgacaacctccaggttgagcaggaaaccatgtttcaaaagataaggtaaagagaaatagaagaagatgtccagcatcaaactctggctctctctctctctctctctctctctctctctctctctctctctctctctctctctctctcacacacacacacacacacacacacacaccatactcaacgctttttaaagcttagaatgtttaggaaaaagcttaattaacagttcagaagtttttattcttaattcactggtgacatgagatgaagaggacagattatacaccaaacttatcccacaaacaagaagttttgcttagcttcctggttcatgcctaaatgagattgaatgggtcagggctccaagaagaacagagtgcctaccccccagggaagaaaactcttcaccagtacaatgaatacaagcacagaggaaaggctgagggttgaatgttttacatttccccatttaaacataagtattaaaagaaaaactttagacaaagtaaatttaatagctatttatatgacaaaaatataactcaagaattaggtgaaacccaaactggaaaaaggatattgaagtggccggctgcaatgtgagcaactggcttttataaagtgagcacaaaaaaaaaaaaaacagctaaagaatactgggggaaaaaaagaaattactggattggcatttacctgagttgggtatagttggataggaggtccacagttacagagtcaatcgacttgttagctggttagccaaccctaaaccatcaaagaaacatgaggatacattctggtgaggagtgtgaaaggaggatgtttggcctctgtttgtgaaagtacaaactagtatagtctttatggaaatccattgaggtttctcaagaaataatgaccaaatgacccagctataccacttgagggcatgtacacaaaagagtcctatcacaaagacacttacacaaccctgtttattgctgctctagtcacagtgaaaaggaagtggaccagtctggttatccatcaactaggcaagtgtataatgaaaatgtgatacacatacactgaaaaattttattcaactttaaagaaaaacaaaattgtgaaattttcaggaaaatcaatgagtccagaaaattgtcgtattaagccaggtgatccaaactcaaaacgaaaaaataaacacgctttcttttatatgtgagttctagtttataatgtgtacatgtgtgtacacaaatggttgtaaatgtaaataaaacctgagagggtaaggatgagaggcagggcaagaggacacatgtgacagagaggaaaggagactaggagagggtacccagcagggtagggaggcaagggctgggagagaggaaggtggagaggaattactaaaattcactttgcttgaaaatgcaataataaaatcggatgtttttatactaattctatgttaaaacaattttccttattgctatttttccttttcatttattcttctttcaatcaatgcctcccttccctctactcctctcagctcccttcatttctcctcacccccatccactgctctgctgggcacaaaccctcctatcaaggctggaattattttttgagattataattacatccctccaatcactcatgcaccctgccttactctttctcaaattcatatccctttttccctaaatatataaacacaacctactcagtcagtacacgttattttcagggttggccatttggtattcactagccaattagtgggctctggcctgaagattatgtctcctcctcttgacgttccttggttgcctatagttctttgtctggactcaaggcttcataggctttctgcttccacattaggcagacaatgttcttcccaaaagccatagactacctaacgaagccccaacactgggcacagaaagccctcttttgagttgttagtcaggagtgtccaaaaaacttccaaaccattataggctattgctgctgctcttggttgctttcaaaaagtggaagaaatacattttctgaaatgagacagctgcaataaatacttcaaatgaaatattctgttcacttggtaaggattctgggtccagaaacaaccccaggttaataacccctgattattttctgttaacacatgactgaacattaatacacactgatacctgcatgagcctgtctctggcatgccaagatagggtatcccctcaaagccaggctgcactggaagctagcccttctgtgcctgaaacagcacagacatacctcagagaacaaaaatggaaaatgaaagcacagattttgttattctttccctgaaaacactgagtatcctgtaggcaaggtgagtttgagaattgtttgccttgtttgttttattctgcttctttcctgttgcatttgtttgtatgtcttattatcataaattacttaagagattactaaatccattactggcaccttagaactgatttgttttcgaagaattccagagagtggccaacggttattttcttactgcagtcatttacacataaatcatattcacagaagattacctatatcacctatttgaatttgtttttctaccaaaccagattccctccaggcctagagcttatgtataaacatccagttcctttgtggctctggattgtcagtcttcaaacccccaccttagattctcactttttcctctcagtgtatgtatacaacatttgctctcctaattatttgacaaacaggaatgtttccatcatctcttactcctattgagttttcttccctgtggtgttttagtttgcatcaccacactgcttttgcatatatttttgagactgttaatatggtaattgcaaatttctctaatgtcatcttgcttgttcagaactatctgtagcctgcagagaaagacaagaccaacaatggagtgtggataactatagtggttcactgtggttgtgactaggttaactgatgttataatctttctgaggttttatgcccatgcatacataaagccacctcccagccctctccaactaaacaccacagctatcagtcaccacagaaaaatgacagggatgtccttttattcttccacaatgctttagttttgatgtgatttgctattgttcttctaaggattggctttatcattaactgtaatgtaacttcatgtagcctgagtcataaacaaaggcatacatagagtcagcacagagctaagtatgagagggatggttctcaggaagacaggggctagcttgcaccttccttctctggcacaggtaagtcctttgtgcttattcccctgggaatggcatgggtggagaacacggaataaaaatgaccaacatgaccctccaaatgtgatctgaaccagagatggcaccaatgaacacaacaaacagggcagagaaaggcccaggaggccttaacccttcacaaagaaatatagacaataggagagctgggaatgggagaggtggccttccccagggagagcaaaccaactggttgtctgatgtcaaagggacagccctgaaaacacacatccaggtagcattacctagactgaacacgtttatatttatatttaggaatataatatatatatattatacataagcacatatgcatgtaataacaattagctgggggaaaggggccatgaattcaaaggagagcagagaggaaagggaaggtagaaactctgtaattaatttgcaatctcaaaaataaaatgtgtcaaaattcagagtacaagttaagaataatttataagcaaagacaataaaggaaagaaacaaatttaaagtgattttaagttttcaaaactaatagaaatcttattccagtcatctgaacagtaaattaactgctaagtcagatagtttcaacaggaagtgaccagctccatttcctggagcttacttaatacagcatgttgtattttatggagaagctaagacataaaaattaaacatctcttgatttgctgtaaaatatacagtgaacatatgacatcaaaacactagtcttatcttcagtgggcttgaatttagtatttcatatataataatgcctcataaaatgtaagccagtacataattatagctattgttattggagtagctcctgagaaaagagtaagataattgacactatcaaatgtaaacttatcttggagaatatagtaatatagataaaatagatgaagaattttttcaagatgtttaaccaacaaagaaaaataacatgcagactgaatactggaaatatggaataataatgcatacttggcaagcatattttaagtgaatgaaagaaactaattaatttgtggaatttattaatggcaatatccacggtgagtcagtacatacagaataatagcttggagaagaagacaaagtgagactggagattttagagtcacaataaaaactaacatttacttagttcttatccattatgattgtttcaaatgctttataaaaattaattcaagccattatcattcttacctggtcagcaaggaagtagagacaggaagaataatggaacttgtttacatcacactcggcagagtcaggatttgaaccctgattgtcagcctccatagttcaaaaatgtgattatgtcatgcttttttgttcctgccacaaagaaataataaatggctaatgtagagaagaaaatttcaagagcccatgtgagttcactgctatgagaaaggacctgggccagaacaagaaaaagctgtgaagtcatacagtagaacaatggaggccaaaattgtttgtcttcatagtggtaaaacagggtgcactctacatgcaaaactaggatgttaaaacaggatattatttatgctagcaatggaaattttaataatactaacagaattgaatgggacatcccatggattagcaacatcaagaaccacagaaaactgaaacctatgagcagagcaagtttgcaagtagggattgggtcctaaggagctggaaagaggcacctgggagaatgagacaaatccaaaataaagggcggatgttaaaatcagtaccctggatgaccaaggctagtttcttccaagaatctctcaaggatacagaagattcaacttaatagaatgggagaagtatttttttttcaatcagcttccatcctacattacccaaaatctttatagtgtcatagcgtctttaagagagtaagtgccatgcatgctgcatgcttctggtaagacgtgagcctgcagggagttgagactgtctatcacagcttagttgggcccaaagatggggttggaaggatgtgtttgagcacacaatgtggcctgctacatgaagtcttcttggaacccagttgtcaagatcacccagtagaatctgagatacaagtgttacctgtgcaggagacagagcctctctaatgatgacacataaggcacaatgagggaagatgacatagcactttctactaactctgaatatattgatagcttatgacctctaaattttatttctaggagttaccccaaatacaaacatattatttaaggttcatgaaagtaaaatcacactctccagacaacagaaactttccacatgtcccttaatagttaaaatggattaagtatgttagggttgcatattacaattttgcaatgagaatgaataaattaagttggatgaatttgataaatataatgtgggaagccagacacagcacaatgcaaactaattctacttcatatatagttcaaaggaaggcataatcagtctattctagaaaccaggctagtggtgacttttagagagaacagagaggatgatcacaacaaggaggcacaaggagcatttctggaaccctgagaagattccactgtatttcttgacctgagttgtacttatacatgcacacacattataacaatgtatctgactgtatttctggtggttcacagaattatgtttatataacacttttatttaaaaagcttccttggaaaaatatgataggtacagtactagatagagtgattggcaagttagtcacttggtaaatactagctacagtaatatggttttggaaggcaaacactgtatttgtaatatttgaatctttgattcccttactaatgccctgtagtcaaggctggaattgagaaaacttatagtgggaggcatccagggaaaagctgttagtgacatcctgcctttggtatagagaggtattcactcatttctgtcctctcctcctaaagccaaagcgcccatctgccatttcctcattttctaccgagagggaatcctagccttaaatacttctttaattttaagtcttcagggatatgcatatccttacaaagagacttttctcttttttcctctttcatatcaattaacatttatcaccctatgcataattaagatccatttaattatgagcattaaacggaggcatgctcccacgagcataccacttttgcttttttgacaaagaaaatgatctctgcacattctctagctccctctcctctgcttggcattaagttttaacattacaagtctcaccggacttaatccctctggttgtccaaagtctctctgcagaacactggggagaaatgtttggaccatcaggtacagtcagcctcagccattttgttccggcttctcggacagagagctgttgcctccctagttacacggctccctttcttacatgaggaatttttaagtccatccaggcacaactgtttcactatactaaatgcattccacactcgagggcatactcagccacatctacacggtctgctcctttctaccatcaatggaggatccctgccagggcagccattctcttcgctcttcactgcacgtctctagttctgtcccttagtgagccatcaattcatatttgcttttgagtcaatgtcctatggctggaacaccagctgtctcatagtatctccggcataatgttgcttacgcagtttcagttcactgaagacactggacaatttagcccaactggtggaccccgtagggacaggacacaaacaaacataggtactagcttaatgccacggttcataaacccaaaggtggacagaaaaatcagtattgagacagggaaagaaaacaaaaataaccacacgtagggaaaaattagagtgtgggtgcaaagttggagtccctagagcatatagcagagtgggcatttgtcatgtgaagaaacagacagatgaatggatgcaatggcagagctttcatggggacttcggagtcaaggtgagagttatatagtccacatccaagatcactgtgtgatgtggactcacactctcttatgcaatgctgctgtcacaacagggttagcgtgtgtgtgtgtgtgtgtgtgtgtgtgtgtgtgtgtgtgtgtgtgcgcgcgcgcgcgcgcgcgcgcgctataggtgaagtcacagatcgcttcttcatactctgaaacctggattcttctccaagcatctttccaaaactgcagtctcaaatctggctatctgcaaaccctctggccacagagtataatttagttgtctacaaagaataaaaggggtctcttttgcctggcgcttacaagcccaccatgttttcaaacttttgatctttgtcaatgtgatagatgaaaattaacatcacagtgaaatttccatttgcatttttccaattataaaggatgttgcacatcttttcatgattttatgggctgctggtatgtccttttctctgaagtatttattcatgccttttgcctatatttctagtgggctcttggactcttcccaaacaagctatgaaagcctctagcacagtacaaaacccagccctttgttatgtaaatacttttcctagatcatctatcttctgtctatgtctctgtcataaagagtgctcagtatagttgaatttatcagtatttccatgacttgtgctctgtgtcacacttaggctttcttctagccagaattattcttaaagactcttgatggttccaatcattcatagctttatatcttcttttctcccttgcatttaaatctttaattcactcaaaagccattttggtctggcatgttaagtatgcatgaggacacatctttttccagatggccacccagatgcttgagcattcttcctctgcactcgtgttttaaaatgatgtctttattggagcctgaattcctggatgcacttggctttgtctctggcctttctatctggatacattggtctatctacttatgtgaaattatcaacctgtttgaacttctatggtactatattagatgggagaaataaccctgatcattcttgctttgtaaattttctcagttaattttaggatcagcttgctttgtggcagagcaacccactggtgacttggtaagatggtactggatgcagagcttgtttgtttgctatacaagaacattctgtccttctccatgtattcatactcccctgtgtctctgaagcagccggaaagttttcttctaacagcttttgcatgtttttccaggttgttctcagacatttctgccctgcctgttcccaattcccattatgactcaagggaagaatgagaagaaagaaagaatgtttccccattggtataatagctgggtcaaatccctccacgctctctagatggttgttgtttgtatatataaaggctctagccttctttttggtaatttcatattctgctacatttcttaagttcctcaccaattcaacacattttcagataattctaggattttcctcaaaaccaatttaaacttccaccctccctctcttttgccctctctccttattcttctctctcctctctccttttctctttcaggaatgttgattaacatcaaaaaaccagtgttcagatttgtcattatggtaggaatcccctggacatgtttttattgcttatccgttattgtctttggtaggatttctattgctgtgatgaaacaccatgaccaaaaagcaagttggagaggaaagtgtttatttggcttacacttctacactgttcatcactgaaggaattcagagcaggaacacaaaaagggcaggaacctagagataggagctgacgcagaggccatggagggatgccgcttactggcttgcttttcctgatttgctcagcctgctttcttttttttcagatatttttatttgaattagaaacaggattgttttacacgataatcccagttctcttctccctcctgtcttcccctaccaactccccccccccaactaaaaccctacctatcacatatcctttctattccccctggatggtgaggtcttccatagggtgtcatcagagtctatcatgtcctttgggatagggcctaggcctacccccttgagtcttagctcagggagtattcctctatatggaatgggcttccaaagtccacacctatgctagggataagtactgaactactacaggaggtcccatagatatccaaggtttcctcactgaaatccatgttcttggggtctggatcagtcccatgctggtatttcagatatcagtctggggagcaagagttccccaatgttcaggtcagttgtttctgtgggtttcaccagcctggtctggacccctttgctcttcattcatccttctctgcatctggattcctgttcagttcagtgattagttgtgggtgtctgcttctacttccaccagctgctggatgagggctatcaggtggcatataagtcagtcatcaatctcattatctggggagggcatttaaggtagcccctcctctgttgcttagattgttagctggtgtcatcctagtagatctccagacatttccctagtgactgatttctctgtaaacctaaaatgtctccctctattatggtatctccattcttgttatcttctattcttcccctgactcaacctttctgctccctcatgtcctcttcactcctcctcttctccccttctcattcccctagatccctcgccgcctcttcccatgctcccaattttctaatgggatcttgaccatttcccttctctagaggaccatgtatgtctctcttagggttctcattatttcctaacttctctggcagtgtggattgaaggcttgttatcctttactctatgtctaaaatccacatatggctgagtacataccatgtttgtctttttgtgattgggttccctccctcagaatggtttcttctagttccgtccattttcttgcaaatttcaagattccattggtttttttttttctgctgagtagtactccattgtgcaaatgtaccacattttctctatgcattctttagttgaggggcatctaggatgcttccagtttctggctactacaaatagtgcttctatgaacatcgttgaacagatgtccttgttatatgaatgtgcttcttttgggtatatgcctaagagtggaattgctggatcttgtggtagactcattcccattttcttgaggagtggccatactgatttccaaagtggctgtacgagttggcactcccaccagcagtggaggagtgttcctctttctccacatcctctccagcataaactgtcattggtgtttttgattttagccattctgacaggagtaagatggtatctcagagttgttttgatttgcatttccctgatggctaaggatattgaacactttgtgtctgtcagccattttagattcctctattgagaactgtctatttaattctgtaccccactttttagttggattgtttggtgtattggagactggcttcttgagttctttgtatattttggaaatcagccctctgtcagatgtggggttgctgaatatcttttcccagtctgtgggctaccgttttgtcttgctgactgtgtcctttgccttacagaagcttctcactttcaggaggtcccatttatcaattgttgatctcagtgtctgtgctactggtgtaatgttcaggaagaggtctcctgtaccaattaattcaagggtatttcccactttgtcttctaatagtgtggctggatttatgttgaggtctttgatccattttgacttaagttttgtgcaaaggtgataggcttgggtctatctgcagtcttctacatgtttgcatccagttttgccagcaccatttgttgaagatgttctttgttccatggtataaatttggattgtttgtcaaaaatgaggtgttcataggtgtgtgtgttaatatcagggttttcaactctattccattgctctatctgtctatttttgccaataccaagctgttttcgggaccatagctctgtaatagagcttgaagttggggatggtgatgcctccagaagttcctttattgtacagggttgttttggctatcctgggtcttttgtttctccatataaagttgagaattgttctttcaaggtctgtgaagaattgtgttgggattttgatgggatctcagcctgctttcttaaagaacccaagaccccagcccagagatggcaccacccaggtgggctgccccctccattgattgctaattgagaaaatgccttatagatggatctcatgaaaacatttcctcagctgggtttctttcctctctaatcactctgccttatgtcaagttgacacacaaaactagccaatacaactgacactttgtcaacttgacaaatcaacacatcactattatgccataacccttcctttcttattcatccccaagttctcacattaaaaacatgaataacttcaaaatcccccagtgtttacaaactcaaacacattaaattttcagtccctgtaaaagagccaatctctttttaaaatccaaagtttctcaactgtgggttccagtaaagtacttccttgcttcaagagggaaaaaccagggcacagtcacaatcaaatctaaacaaaatgaaattccagttgtccaatgggtgggatccactcaccatcttctgaactcttccaaaggacctaggtcacttctccagttctgccctatgcagcacacacagcttgtcttctgagctccggctggctccactccactgctgcggctactgttcctggtagccatcacattgtgctgacatctccaaaatactggggtcttctgttgcaactggactggcttcactttcaccaatagcctctcataggctttcctcatggtgacaagcttcaacttctttgcatgagcccttcaatcctgagctttaaattaccaccgaggctgcaccttcaccaatggcctctcacagtgccaagcctaagctgctctccatgacctcttcatcccttcataaccagtaccatctgggtgactcttagatattaccaagtccagctgccagcatgaagtacaacctccagagtatagcttctctgtgctctcaggaaacactgggaagatttcacctcaatgatgctggtctcttcttaatcatggctaatttcttagctccagccaaccagcatcaaatactccagcaaagcacagtctcactttagtagttctggtatcttgttaatcacagctgattcttcagccccaactaaccagaaccacagaatcttaattcaaaataacaaatggccccaatggagtctttaaacttccctctgaaacttcacaagccaggccttcctcttctgcactgctctcaacatttatcttccaagctcctacaaaacatcctacagagttcttaacactcaatgccccaaagttccaaagttgaggagaaaagagtttatttggcttacacttcagcattgcagttcatcactgaaggaaatcaggacaggaactcaaacagtataggatcctccaggcaagagctgatgcagaacccatggagaggtgttgtttattggcttgcttcctctggcttgctcagcctgctttcatatagaacccaagaccaccagcccagggatggcaccacccacaatgggctgggccctcccccattgattgctaattgagaaaatgccttacagctggatctctgaggactctctctgtgtcaagctgatacacaaaaccagccaatacaatacaatgccagtcagtcaatgctattgtgtcagagagcatccctgggtcagtatgatattctcatcatatggtaacatatcaattaatattttaaaaacttttagccttttatatgatactaaggattaaccctgggatcttgtacctactcaactacttttaatgcctacaataaatttcctgtggtctctgtataccatacattcaaagagctacttgattctgcttgctaatttcatttgatgtgtctgcatcaatttttataaatgacattgatctgtagtatttttatgttcaatcctttattaggctcactgcatttatgaaaagaatttggaagctctcaatcttttaatctaccctagagctgccttctcaagtataacagccaacaaaaacatgtggctttttaaatttaaatgaactaaaactcaacaaaactagaatccagtccttccacagaatgagatgcgttcaagaactccatgaggatgtgcctggcagtcatgcttgttggttatttgaacacagaaagcccaaagatacagcattgcttcaggtgcatgtaaaagacatccaggttacctgtttgctcatataatgtttggaagaaatggcaactgtatagctgtctgtgtgtctttgatagaaagtagtattctggtttttctattctttctgggatcatgtgtgttcccaaaatttatctattctcccgatgttttcgaatttatttgaatgcactttaaaattcatctgttatgactcttctaaatttcttttagtctacagttatttcttcagccttcttttattataggagggaatctgtgaaaccttcttgctttgttgactagatgaagtgattttgagctgtattctccaatgattcagccaaacactaatccaagtgcttctgtgagggaatcttgtagcctatacgcattatgctttgaataaggaagatttttctagctattctgaggacaattcaatcctttgaaatttcttgggaacagaatggaatttcttgggaagaaaaagaaagctctgtaaggcatgaccactttacatgctccagcctgaccctgctccatggattgcagacttacttatgcagcccatcatcaaaacagatgaagattagttattatagtctctgttttattaatttttcaaggggacagcttttcatttagtcattaataatttttcaaccccctcttttctaaatcattaattttgcttttatctttcctaattcccttattttgctctccactagataatattattgggttttaataactttttgagatatatgattaatacatttattttcattctttcttacatattaacatacattctgcatatattctcaaagcactgaattaaaagtactccaaaacttacagtgaccttctaagtattctataacttatttcagtattttcttggggatcagagaaagcttcagtatgtactcatctttaagaggttcagtttgctggcagtctttgggacacccaaatgtttgatttttctttgctgctactcattttgtaatttgatattttactatctcttcattattcaaaagacaggatttgcattttaactttcattcctaagaatattgatactattacagtgccatcctcaaactgaaaatctctttaaggcatcattcacatatgctattgaagaccagctcagcatcaagaaaatgaagcattaggagcgaaaaggcatgtggaaaccagatgtcacctctggagagttcattctcttctgctaccttgtgagacctggggatcaagctcaggttgaaatacctctacccactgagccatctcactagtcctacataaaacataattgcatctatggaactgagagacttagagagaatgagaaagggggatacaggataaagattaagaaaaggggaaataacaagacagtaataacaattgtatatacacacatagtcaagactgaaggtagactagacatataaggagattaagtggacatgggaattactttggctataaaagtactcccctatcctaggtatcctgggttttctttgcaaagatatcaaaggacaagaatataatgaacaatgccaagaacatgtacaaattagaatttgataaattagaatcatcaataaacctaatgtaaaccactttctacagtaagttgagacgagtgagttccatccttgggataagagtgacccaggagtagacgctgtttgcataaccttgctaccagcatcacttatcacatgaccaaggattcaccaaccttgaacttaagctaaaatgatcctggttcatgtgcccctgttccaggctgctagactgaaataaatgcaagctttctctttagggagagagatttattctatatagtactatagatattttttatttatagtgaaaacagcaaaataaatcaggcatatgaggaaatggattcaagaaaaacaataaacgtctaaaagtttcctctaacgcctcatatataggcattatcagacacagattataaaattactgtgcttgctgtgttaaaaagacattttagtgcttgaaaatatctacaaagaaccagaaaaactgacagtatgtatttgagagagagtcaaatgaaattctgggactggaaagttagcaaaactttaaaatgagaaaaacatgttaaaatgcataagtcctaaggaacagaattcaatccagatgaattaaaagtacaggaagcatagaagaaatggaaaatagaataagactgggtaaccaatgtttaatcagatggccagagagagagagagagagagaaaggcaatatgggacacataatactctgaaggtaataaatggctgaacagatttcaaaatcaaagaataacattagttcaaatattcaagaaaactgagctactgacaggatagtttttaatctcacatctagatatagcactgtgcaatggcagaaaacaaataagaaaacaaaaactatatttagaatacctagatggctgcttctccccaacacacagagagagagagagagagagagagagagagagagagagagagagagagagagaggaggtaatttgtactccttttttcttttatttttgagatcattatgtaattactacatttcttccttccatgctctccctccaaaacctcccagatacccctccttgctctcttcaaattcatggcctctgttttcatttattgttattgtgtgtgtgtgtgtgtgtgtgtgtgtgtgtgtgtatatatacatggacaatgttacttgtaagcatgtttccagggttgctaaattggggttgactaagcagttggtgtgctcttccctctgttgaagaactacctttataagagaaagcaaattgagaagtgattttacagtcataactgtggagctagatagagtggaatggtgtttcgatgtggtagaggaaagaacatttgccagcttaaagtactatatccagtgaaaactttcaaaagtgaagagcatattataaaaaatgtataatatcactatttcttaagaaactgacaattaaagggcccaacattgtcaagcatcaacaaatacagggagcaatttgtgctcacagaatgtttaccagtgggagtataaattagggttgctaccttgtaaaacaggcattttcttacagatgatacatttatggatactacccacaaattctatttagctatatgccaccaaaagttatttacctggtgaaaaaatgtattaagatattttgtttctgtccatgcttaaagagatcctgaacagctttgagacaggagctggccatcagaaaggccagcacattgttaaagggtgtgaatccccagcctcctgactccaggaagggaaaactgaagtgtgttcaatctcatggtcaataattcaaccaattacagctatgtgtcgaagcctcaattaaaaattctagagacagaagctcagtgaagcattctggcactttcagcttgacatgttgacaggatgaaccaccaagtttcaaagaagacacgggcattactgtagtgcccagtggtcttacttcatttggctcttcctcatctataaaactgtgttcacacgaatcatattctagtgacttatcaaacctaaaagggtaatcaaatatcctgatttcatagatatccccaagcacatgttcccctaagactttgcaattggcattggaagtgggtatggtcttacatactatagctctgctaaaggaacaaagcaataaaataattcctaatagcattgtactatacctgtagatcagtgtctcactcaaccatcatcaatgaagcctcctcttgcagtaggtgggaattaatgcagagaaccacaataggacagtgtacaaggagagagaagccctggaatactcagtcctaaatggaatgtttttatcaaacctctcccctttcaggaggaggcagagattgtaggagtcagaggactggatgacaccaaggaaacagggccttctaaacacagcagtacctatgtacatctgaactcatgaatactatggcagcatgcacagggcctgcacaggttcaagccagatgggatctcagaactgagagggggaagtggccatgagctcctgttccaaatcaagaagttatctccaattgacagcctcttgcaaaggaaaaataagttttgtccattggaacctcactggatatacaagacatacttaagagtagggcacatgtgtagcaagagatgccaaccacaaacaaattctgtagtgtttttgtgggtttttttgttgttgtttcatgttgctttgtttgggcttttttttatcatattggtcttttgctggtatattatggtttctgattttgtattttatggattttggttttgtgagtgtgtatgtgtgtgttgtgcttttccactgtttattattaatgtttgtttacttttatttacctgtttatattctaaagagggagagaaagaaggcatggagttgaatgggtgggaagagtgtgggaggggtggtggtggagaaacacggtaagaatatacagcatgaatcttcagttaaaaagaagtagggctggtctaatgaagaactgagatcattgttgaacatgatgccagctccgggtagttgacaaggaatctatgttgcaatgtaccacggttaaaatggaaaacagcattctaaagtctgtagcaagctgggcaaaagcctgggcactctgtatgatttgtggctgatgtctgaactagtggcaggcttatgaagaaacttttccttattttgtgaggtctgtgctagctttgggtagttaatgtcaaaaatgaattaaattgtaccacactcaatttttagggaatcgatgtcagaatatgtctgtgtcctgctaagtgtgttcactgcagaaccatttataataaccctaaagctagaaacaacacaaataccctgtgatacagttgaaaatacagttgaaaatgtgtaatatatatatatatatatatatatgtatatatattatgtaatatatatgtatatatatatgtaatatatatgtatgtatgtatataacatatatatatatatatatcataacaaattggtgaattttaaagatataatgctaaacatcataagacaggtgcagaataatgtatcttctatgatttcattcatgaaagactgaacacagacaagaatattcaaacagtgacatttgttgtgtgagctgggacacaaaagcaatgaagtaatgcaaagaaatagttgccacacaaaccaagggatgatttcctttgtggggaagagaacatttataattgtcaggaggtgtagagacagaatttggggggatgactataaatagttggcctggttaatgttttgttttgttttgtttttttgctttattgaatcatgttttattcacttttctgtgtatgctctacagttgataattttctaagtctttcaaaagccaaagtgaaaatgagaaggaaacatacatattgaaaacacattgaaagcgtacccacgccaccacagttctcagaattttctccttgctcctgcttgccttagctcctaaggattggctgcaactggtctaactttcataaactaactgcaggaaaccttgcttcccacacactctctgccttgtcccagaagtgttctcaccaaaaaaaaaaaaaaaaaaaaaaaaaaaaaaaaaaaaaaaaaaaaacgctgaccacaacaaaaaccaggcacaagtcaccataactaacatagaaacttggatcatttctgtctcctttgagtcctctgacctgcataaacaaggtaagatgtgcagtacaaagacttctgaagagactgtgctttcaaacaatgtgcaagtcaggcactcacatgctatgggagtaaccaatgactttattgggtttaaggcttgctccacgagctagaacccatacctgatactgttgatgaggccaagaacctgaggctatatagttcatggatcctaagtgaaagcataatgctattattcttctaaaagaacgtagcaataaaaatgattcttgataacatattgttatgcccatagttcagtatattactcagcttccatcatagaggcttcttgcaatagatggtaattttcacaaagactttcagctggacaataggcagagtgtgggagactttgggagactcaagcctaaatgggatgcctttgccatatccctccctcaagggtgaggcatctatacagaagatgaggcagaaagattataagagccatggatggtagacgactccaaggaaaggactgacacacagtacccacggagactgtgacagcttacacaaggcctgcacaagttcaagccagacaaaatcccagcacaaaaggaaagttggcaaagagtcatagccctaatgaagaagctatttgcaagtgatagctgctgagagatggaaagtcagttttcttcaatggagtggcattggatatagcaaccacactccaggctgggccccaaactcatgataaagtggccaacacaaaacaaactccagattcgggggcaggagggagtgtcagtgggcatgtgtgtttgtgttgtatcattttggatttggtttgtcttttaagaaagaataagatcttgaggttgagcaagtctggaatgggaagatctgggaagagttggaggagggaaagactatgacgcaaatatttttccaaaaaattttaaaaataacaaggaaatataaagaaaggatgcagggctatctacaggggtgggcagagtatactggtagaacatgagagtcagtgaccctcctgcatgctggcttattaatgaatgctgtctcttgactcaccaactccagtgtcctttgtgaccttatgattgctgtgaaccaggatgtcattgaagtaaaagtctgatgtaaaataatgtagaactgaagttatttcaaaaatagaaattgaatgggaaagtgtttttaaaaacttgattaccgaaagggtaaattcttgacctaggtaaatatgcaattgtttattaattaaaataataatttaaagaaaaaagtttgacttttgaggtaaagtttgttttgctttttttgttttgttttgttttgttttgggttggttcatttgggatgtgttttacacagagaacaattggcatttatggaaaataaaatttttagccttcacttattctaatacaggtgtttgagatcctttctttcggcttttaaaatatattttattccaaatttgaagttatatctaccatgacaagattttcaccaagataatttaatccaatctccttaaaattggtttaaaaaataaatccctgagtttttctgtctgaattttctaatttcagattcttcgcaccctgacccaacattgcagagagaacgttgcccattctctgtgctgtgttgaaaatcaacaagactgacagtacacctatgccttttcagttttgaaaatgaaagagcatgggtactgcaagtgttaaatgcaggtgaatttgatagagatactgagagcatcagtggtgtgtagctttaagtgggaacactgtgggcaactgatgaagtaccagatggggacatgaatttagtaattaactgtctggagctgggaatgtgatctaaggctagaagacagtgccactctctgcagtcatccataggcctggcctgcttcaggtgcttctgccctccacagcaggaaactgcatctttgggttcacagagatgctcctgtggtgttcatgtcctatataaagagaatacaagcctttgtgctggctatttttatggcaacttggcacaaacttgagttttttgtaagagggaacttcaaccgagaaaacacccccaccagctttggtccatgggtatgaatgcacattttcttgaataatgattgatgtgaaatgagtcagctcactgtgggaggtgccatcgctgggctggtgatcctgggtgctgtgagaaagcaggctggtgaagtcatgaggagcaagccaataatcaacactcctccatggcctctgcatcagtgcttacctccatgttacactcagagttctttccttccctgacttccttcaataatggactatgatgaggaactagaaggtgaaatgaaccctttctgcccaggtttattttgagcattgtattttatcacaacatcagaaaccctaaataaggaaaccttcctccagggatttagttcccaaacagtctctctaggtggaatttacatctaagtctctattctggaggtggccttggaatttggcatccatgggccacaagctaggaaatgccaatttgtttaccctcctctgactattgggagctcttagtgatttgtgatgatatattttgaggaggttgagattgttttatggtcttgtctggaccaatttgttacagatcagaggtgtccaaagagactgattgggaaagtgaggagtgaattcctctactagtctatagaatttagttaatagttaacacatatagaaatatttcctatatgtcgattcaaaatacacacttttagaaactatatgatttagagattactaatcattttagtaaagccttgttttctacataactttcctgaataaaatgtgaataacgatggaagataaagaaagaaaacagaaatggtagacacggatctaaaagaaaccaggaattttcacttgacaatcagcacaggaaggcaataatagatctgggtgcccagtgatggagcatggaaggaaatctactctggccctgggtaggaaatgacttctgagcccctgagcctagatggtcactacatggaaaatgagtgtcagtgtctgagattaaagagaccaccttgtccagtcccttttcacacaggaaaaacagtccagcacccagtgagaagcagcttggacttccatccctctgctctgtccatggccaccctgagcttgactggggatggagaaggcaaaagtgaacatcgatgtgcagagtcctagatactctttggatgtcttcaagcttatcaagcctggaatttctgcccacatcaagatctcttggctcctaactctgagtatttggcatcatgatcaagtgtgagataaaggagaaacttcctatctacctcagtgccagagacacagacactggggaactctctagaacaatatgtctgcattgtgtatattggcaacaacggctttattctgaaataaaccttggtcaggaagcagagaaagtttcccataaaatcactcaggagtttccagtgggaactttctggcctgcattccagaagaaatctcttctgtattcaccacacctatttacatgaacccatgtggcagagatgcagtcgttccttaccatatgaaatgagggtgaaatgaggagtgtgagaaggaaggtcaccccataaaccagccttcaaaaaaagaaaaaactaaagtaattgctctgtttacccctccaacacttttttttagcaaaataagatttccaggtctaatcaatgcttacaaattgtcctcatccctttaccacagtgtcagtaggtgtagagtctatgcaaacttgaggccctctggtggctcataagctcctgttcatcactaaaagcttagccagtcccttagagttttccctaagcctcaactcattgcctgcatgagcatgggcaggagctgagttggacatgatgcctgtcatcatgctgactccagaaatgaaacattggactcacagatatacacataaattcctcaaatcacaaacccagaaagtaaggaatgaagatttggatccaggtcttatactttgtggtttagtcctaataatggatatctttgctaggaagaaacttcttcccattcacactgagagacagaccctggccttcagtgaatgttttggtaacataaaatgagagacaatagacctaccaaacagtctatttcatttgcttgagaacttatttggttctagactatgaacagagtttattatttactagattctcaaaagcctttggtcgaatcacactatgatacaagttgtatctatgaatttgggtgacctcaagagggatgaattggtcacatgggatcttcatggtttggaatttttgccaagaatcaaaatcttgaagcaaaggatggaagagcatgaaatgctatcacctcacccgaattctgtcatgtcctctgtgctacctcctgcttataataacaaaacaagacattttaaatgtattccctcatgggactttcttctaaaacagttctcaacctatgggtcgagactcctttgggctcacatatcagatatccagtatttacttaacaattcatgccagtagcaaagttatagtaaggaagtagcaacaaaattaattttatagttaggtattaccataccacgagaaactgtattaaagagtcacagcatgaggaaagttgggaaccactgccctagaagaaaagaaaccaatgaataagtctgggatccccagaagtaatcccattcacatgattccatgcttgctttattcaaattgtgcttctctttcacaaatactactaaagcaatcaactcattctttaactcattaaaccggtgtttgttgaacatttgctattactgtcacttaaccagctgcagtcagtttagtgaagcctttacacaaaccctggggcacagacttttctgtggataatgtgagtggcctttataatagaaaagacgatattgaggactgtaggaaattacaattaagaattgtctcttcagcaatgtcatcagtgcctttatgtgcctaggttaggagttcaatttcaaggcttgtgttttcctgtcttctgaatcttcaagactgacttgagcagtctggcttgagaccaatgacctcatgtccacagcaaacaaaatcaccaccaacaatgggataataaattgtagccaattgtacctgcttttgcaagctaatatgaaacatacatacaagcatataatccagattagaaactgaaaagtggggctcagagagccatcttccttaagaaggacacaaacatgattctttacctgatgtggcatctaggaacagagagaaaacacccaggattctagaccccccagtctgtgctctctagagaactgtggagaaataagtggttcctaataactactgtctaatggttcctctgaccggtgaagtccatgggaaacacgatactggtcactgattatttgcatggagagaggacacagagcggaacagagataattaaacagcattttagtttcagaatagcagacaaacctcatcagagcttaatcttgagatttgacttattgattctttatagataatcatgagcatgccaagataaagcaaagcttcttccttcaaaagcaaacatttcaaatgtttctctctcatcccttcttacatggcatttggtaaacatggcttttctcataagccatagaagcagcccacccgcctgccctcaacgggctcactctcctcttcaaggacctgcatacccagctaactgaggggttggattccttccccatcatcctcagctaagatggactctccaagctctttgtatcattgcttccttcaacttcccaaatcacttccaacttgatcaatagaaaggcttttcctaggagcaacagataaatttgagatcaaaatgctaattgtaatcttttatgtctggacaggtcttgacagtttataaagccatttgacaaaattattccattaatcttcataaaattccattttgtgcataggtattaccatcaacatgagacaactaaggactctgctatgcagatatgttgtccttggtctccttgttgcaaatctattgccttttcagataagcacagatgccctgttgtactatgctaaagtacattttcccttcccctgctaaagactatatatttctttatcagatcaccctttattacagtaattctgagtttcttggaatcaaagtacagcccatgaagtctgcccaagaggtggcaggtgccactgtcattaagtgtggtatttccaatgaagatattggagctatcacaatagtatgtgagaccaaggtcatccttgtagtagatcaagatgctgacaccgcagttcttccagccacagcacctaatgaggaaggacccccgctccatcacatcagcaaagacctgaagaatcatcagtctgaagagcattcatttcattatggttgtttatttaacaatggatggtaagaccaaggaagggttgtagggagaaagggacagacagacccacagacagataaaaaagggcatccacagatgatcacccatccatttattggttcataagataaactaataaacagagacaaaatagtatgtataacctgacttctgcaccagtgaattctttctccccttgaaaagtcagtctggagctataaattctccaaagtcattcctgccccattcccctcctccctgccccagacgagtgcaagcacatgcgcaagtgcacacacacacacacacacacacacacacacacacacacacacagagagagagagagagagagagagagagagagaaagagagagagagacggccagaaatgcagaattcccttcaaatctgatatacctgggactagttaaacaaaggcaggcaggcatatacatcctgcggagttttagcttagggaatttgttttgttctctctttcttcacagaggtttctcaattctgtgattaattccttaaaatatatattaactacttgtttaatttctacttactgtcctgttccctctgtagatctgtgtatcaagttgtcagggctttatctggctctgtgtccctagtgtctaacatagtttttagaagtaggaagatactcaatgaatatttgtcaataatgcctcaacaaggtataaaaatcatattctgtggctaatgccacttttaagaataataaaacactcataaatcgagaattttgactaagaatatggctaacttctgtattgtatttaagaaaagccctttaaggactcctctcaaatacactaacagtaaaataaatagctattcttcattgtttcatttgtatttagaattggcttagagattttaaaacacctttttctcaaaagaaaaaatataatgtgcgacttatccactcaaaagatagtttgtttattcaacatttattgctgcttaaatatgttgtattaaattttgacactagaagtaaagatgaaataaggactgtttttagtgacagtaaaagaaatgaggaatgcacacaggatctctcatggcacacagattgttcagagcaaatcttcactcaagccttatggtccaagtatgcatgcacagcctttgtcagggtccacatgcctgtcatgccatttgatcaaataatttcacatttaaatctaggaaaatagaagaagcagagcagaaaaaatattgatgattgactagactatgactattgaaagaaatgtaaggattggtgaaaaaaacactgagctgtcttgagtctaatccccagtgatcctgatcttaaataaataatctacactcttccaatctccaggtttgtcacccctcaaataagaaatatacattcctgcatctgttgaatttacctgccatcacttctaggtacacaggattactcttgaaaaattcttgttctgaatggtggcactcaccatgtccaaatgtgaagttgtcaccttagaattggtgccattacagatccatttagtagaggagtattgaaggggattattccatgacatgtaagagtcgctttctttctggtacatattctaaagcatggtgggttcaaggataccacagatttctgagtgtctgagaaagtaaaattgtgaagataaagaaattttaagtcattgaaaattattctggctcaaaagtacaaacatgccaatagtcaatcgatggcccatcttccctggcagaactgacaaaactctgtcctgatgtctaggaaaagcaataaagaatgaagtaaacagtgttttggcctcaggaagcaatcaagccagacacaaaggcagcacacaaaaacaagagggttggaaagaagcaaactaatttacaatgtaatgggttaaactactctaaatctcttcttttcaatttcagtacctagaaatgaaaattgttatctctttgtagatagagatactatttgtcacactcaatcattgcttatcataatggtatatagtgcttagtaaataactattaaacggctgactgtaggaataatggataaatatcaaagtcttggcttcatcaaaacatgtcaggaacaaccgtcaatcatttcaaactacaacaaggattggtacattttattagacagtgtatgttaataaattataataatggaaagaaatgtaaaaatagacgataaaatataagctttataagatctaaattaccataattatttaattgtgaatatgtcgagtgaggaatatttggaatcttagaaggtcatgagaaacatcaaggtgttaatcttaaatggcaaggagatgtggtgaaaatttaaaccgaagatcacaaaatgggtaaatggtgatgacaaagacgatatagtcaaggaacagtattcagagaccccagggaatgaagacaaaatccgatctttgtcagctatgcaacttccccatctgagttccagggtttctcaagtataaaataccaataaaaatagcaatgtgaatgttggctgagtagatgtgaaaggcccggaacagaggctgagacacgccagggcctttgcgaaagaagagatgatttgaaggggaaactggtacacagaaagcttttgaccaagggaaaagaagggatagataagggatggatggctaggaagcaggctgtccagagtgaggaagattcacacgagaaaacaaatatggtgggatacagtcacacacgtggagagcaatgctcagacacagtggcgaaacaaagacacaggactcacccactagcatgacactgggagctgcaaaatttatagagagtgagttagcatctatctccagttttccatagcacaagaagactgggatccaatgggactgatacccacatccatgaagatttaatgttcaatggggagaagtcagtgcattctttcctctatcctcctttattggtatctgtcctgtactctaatagatgccagaggactgaaaagatccaagctattaggaagcaacctagacgcccctcaactaaagaatggataaagaaaatgtggtacatttacccaatgcagtactactccgcggtggtggtggggggggagacaatggaatcttgaaattcacaggcaaatggatggaactagaagaaaccatcctgaatgaggtaacccagtcacaaaaagacaagcatggtatgtactcactcatgtgtggattttagacatagagcaaaggattaccagcctacaatccacagtgtcagagaagctaggaaacaagaaggaccctaagagagacatacatggtcccccggaaaaggggaaagggacaagatctcctgagataattgagagaatgggggaggggagagggagttaggagaaagagaaggagagaagaggaggggagaggaggacatgagagaacaggaagattgagtcatgggaagaatagagagcaagaaaagagataccataatagaggaagacattataggtttaaagagaaatctggtgctagggacatgtccagagatctacaaggatgaccccaactagcaatctaagcaatagtggagaggctatcctaaatgcccttcctgacaatgagatcgatgactaccttatatgccatcctagagccttcatccagtggctgatggaagcagaagcagacacccacagctaaacactgagccatattcctggaatcaagctgcagagagggaggagtgatgagcaaaggggtcaagaccaggctggagaaacccgcagaaacatctgatctgaacaatggggtgttcatggaccccagactgatagctaggaaaccagcataggaccagaccccctgaatgagggtgttagttaggaagcctgggcactctctgaggcctctggtagtgggtcagtatttatccctagtatatgaatggactgtaggagcccattccacatagagggatattctctcagcctaaacacatgggggagggcctagaccctgctccaaatgatatgacagactttgaaattctccatggaaagcctcaccctccctgcagagcagaaaggggatgggataaggagtcggtgggagacaggattggaggggagggaaagggaactggggttaacttgtaaaacaagcttgtttctaatttaaatttaaaaaagaaaagagatttaataagaaaactaatatatgaaattcatttcatagtaccacagctgtttctgtgggtttctcctagtatgtgaaagatgtttaataaatatgcattccccattttattagttttatttgttaaataattttaataggaatattgattagatcagggttatagcaataggaaacctgtataagatcattaactggtatctcatgacagggcactttgagcacttgtggtcatttctgagtcattagaaaagatcaggatcaggaaagaacagaacacagaagtttggtggggagagacataagggaagaatggagaaggctcttgatttgaggtgctggtggggtaatatttgaattcctcaatccttgaagagacaaagacagattgtactttacacattgttgagaatttattgagggatttgggggattctcttccccagaatagaggtcctccaataaaactgactgaattgctgacacttcactgtggcccacacagcttctacaagggctttccctgaagtctgcacactgtccaaacagctcctacttacatgggagcaggagtgagctccctgagagctcttgcctagtctgaagagggtggatttgttcatgagatcattcttatttgcttcaccatctaaagcttacacttaagtgtccaacagtgagaagaaggtgctttggatacaacaaccccagaaaaacagcaggctcaaccaaggaagttcactcaagcttaagaacaagctagactatcaacccttaaaaacaaacaaatgagttgcaacatgaccaccagaaagaataaaccactctctaactaccaaagaacattaccatgttaagcaaaggaaaaggctaagaatccagaaggcattgcccctcttgatacagtttccattctatacattctcaaccttatattaaaaactgccacccatattttatatccatgtctggatggaatagcttctcatctcttggactcagtttgtctagaccaagaacatgtgcacggaggttttggatcttatgaaagtcatattttaaactaatttgtttcctctgtgattatttttgtgagcatgcatttgagaatattattctgagatggaatcaataggctcagggcaccaaaagtaaatgtaagaaaccttgaaaaattttgtgataataaatggtgcaataacacacacacacacacacacacacacgcacacacgcacgcacgcacgcacgcacgcacgcacgcacgcacgcacgcacgcacgcacgcatccatgtatgcacaggttgtgtgaatttcgaatttaaacatatattacatagcacataatagcatcatcctacccagatttagacctgttgccagttcccagaagacttaatctgtatctcagtttgtggcatggagacataaaactctaatgactgtgcgtaaatgacgcagttttttgttctgagaggtgtccttgaagctggattcagagtgaggagctttaacccagaactttattgtcatgaaacatgtctgaaacagaaacatcagaactgagtttattctccgtctgcttcttccaaaatcaggaaactaaagggccaatgtgctggcttcctctgtatgttcagctaaaccaaggtccacataatgttggataggaactgttgaaaagacagtatacctgtctcctcatgttatatgaatctcataaatcgctcatgctctctaatgatcatgcacaaggctaaatatgcaacacattttatcagttttgtccctcctaacaattctttgtggttgttaatgaggaaattacatcataaggaatgtttgaagcattttcaattgccaagacttaagattttaaccagggctcatatgatccctccaccttctcttcaactggactcccagctcagcccagtgcttggctgtggatctctacatctgcttccatcagttattgaaggctctatgatgactatgagggtagtcactaatctgattacaggggaaggccagttcaggtaccctctccactgttgctaggagtcttagatggagtcatccttgtgggttcctgggagtttccttggcaccaggggagtcaagatcatgatggagaaaccccaagaaacagttgatctgagcttgtgggagctcacagactctgaacaaacaactagagagcggcatgggactgacggaggccctctgcacctggatgacagttatgtagcttggtcttttgtggggtccctagatgtgaggccaggacctgttcctgatgcttgagctggatctttggaacttatcccctatggtgggatgccttgttcagccttcatgcaggcaggcagaagcttgatgtgccatgctttgttgattcccatgggtggccttaccccttctgaatggagacagaggaggagtagatgcggggggtggaaaggaggtggaggagataatgggagaagagaagggaaactatggtcggtatatgaaataaaaaaatgataaattaaaaaataaaaaatactttaatcaagacatttggcaggaaagtatatatgggtacaaggaagattggtggaataaagcatctttgttcagtcagcacatagggactgagtccctgcggattcataatggctactcaaaagctccatagactcaccagagctactcatccacagacaggaaaccattcatctaattcatccatttcttgtttgacacatcactttcatcattccaagggatgatttctcaatccagaaccatgcaattagttgccacttgtggcactttaactgagttcattctgtaaagatctctttttctaaagagatcttttacttgtgtggggggagagctgtgaaaaccagatgaggatagcaccccctcaaacagtagtacacattgatgctgagaaacaaactcccatcctctgcaagagcagccagtgctctgaaccactaagccatctctccaaccctcccttccagtgttaaagactactttctctctaaccagaaagggagaaacaggtggatatttccacagaaaacaaacataccagctgatatatatatatatatatatatatatatatatatatatatattctgatatattaaaaacaaaatactatcactcaaacctaaaggtaatcacaattggactttgaaacttggtagaattaaagctgctattgcatgggcaggtcttaccagatataccacctgaatgttatagtggaagccaagtggttaaaacatcagagatcatggttatcttctgaatgcagatgaaaactcagtaccctggggaaaacttgactaaatcgtgttagacttcttgggtactccctaatctgcagaatacatggggaaataaaagcattcataggtgccctaaatttcttcagggctgaaccaggatctgagaataatgtacttcacatcacaccctgggttatagcgcatggagcgggcatctgatttttaagccgcctgtctttgggatatataaacagccacccattttgtgggtgaggcatcttgtgtcatcttatagctgagggaagagtctgaaccatgaagagttctaaagcacactgactatcagctagctttgcctatgaacatcatttctaaccaagagaaccaagcaatgtagacttgtcttcctaggatgtcaatgtgaagtgactgtgcacagaacactcagatcagggagaactgtactatcagcctgctgagaagatgcagggatgggatcattattacatactaaaataccatattaggctaatatttttaaacgagtaactagacataaagaacagaagtctagggtgtgaacagaatcttaagcttgattctcaactcagacctcttatttgctatgtggctatctcaaggtaccaaattgcctcatgcttctgatgtctcacttgtaaggtacagggagaaatggttcctgtcttaagggcatttgtgagtgttaaatgagttaatatagtgaagtgcttatcacagagcctgaccgatactgcatctattaacagtacctattactggtatgatgggtggtttgtatctctactgtttttgctaatagagaaaagagaattaggtgaaggtttccccagaaacaaaatttgaataaagaatagtctccaaatgtatttccatcacctgatgttttattgccatagaagtagcactctgagctaccggtgaccgtatcattaaactctggtaacacttaggagtactgtcctcactctagagaaacagttcctacatcactctgcaggcctgcagggctagggcaggagccaggggtcattgccaggtgtggttccaggcagaaattcccatttttcagtcagcaactggccaaatgtagtgtgggctgggatattttatgcttacttacagaaccaaactgtggaaacagccttctcttaaaggaggccctttagtctgtcagcagataaggacaagaggtcttggcccagcccagagcatttacattttaataggcgaagtgcagctcctcatctttcagaactgtggtttcactgtagtgtgagcagtgtgcttctaatggataaaggaaattactgcaggtgttgggaaaaggagacagccatacatggaggctcatacctgtaatctcagcagtaagaacactaaggcagggggatcacctgccagattttgaggccagcctgggtacagaatgagactgtctcaaacaaaacaggctatgaaatggttcattggtaaggtgctttcttgcagatgtgagaatttgtgtttgacttccagcacccatgtgaaaactgtgccccaaagcaccttccctaacgccaactaagaggtggaaacacaaagatcctggggcttgctagccagatggacagatgaatcaatggcctccagatacacacacaaatacacacaaacaaacacacacacacataccatacacacctgcacctacacataaacgcaaatatacatagagacacaaaagaacaacaatgacaacaaatcaaagaaaggaaggatgtaatggacaaaataacaagtatctgcagaaagccttgaggagtgtgtgtgtgtgtgtgtgtgtgtgtgtgtgtgtgtgagtgtgtgtgtgctgtgtgtgtatgtgtgtgtgtgtgtgctgtgtgaatgtgtatgtgtgtgtgctgtgtgagtgtgtgtgtgagtgtgtgtgtgagtgttgtgtgagtgtgtgtgtgctgtgtgtgtgtgtgctgtgagtgtgtgtgtgtgctgtgtgagtgtgtatgtgtgtgtgctgtgtgagtgtgtgtgtgagtgtgtgtgtgagtgttgtgtgagtgtgtgtgtgtgcgtgctatgtgtgtgtgtgagtatgggtgtgggtgtgggggagttgtcttaatagcaagtacgaaggagacatttgtgagaacggtaggcaactgaacacactgtgatactcaagacacgagggcagccttacatgctaagaatctccttgtttgtagacatctttttaatgcccagctacacatttgataatttctttgtcttgactttgacaagtaagtacaaaagcatttttgtactttctcatgtatatctgattttacaggaaataagctgccatgagtattgagggaagagtattcgttccctttcttgaagagtgccgttcagtcttcacatttcaaagaatcagatcatcaacagctaccatgggctcacgtcaggttgtgtttatcacttatgcatcataggcccacttcctttttatagcattttctcattttaaagttctgagttgttctgactttatatacatattgaaaacagattcttctctcaaacaatacaactcaaccacagcttcctctctctctgctcctcccactacacccctcccccagatccacttcccttccaagagacaacaaccaaatatgataaaacaagatacaataagtcaaagcaaaatccctcccatcaaggctggacaaggcgctgtgtgtaaatagcacacaaaaatagattcaaacttaagatcctgaaattttatcatttagaggtctcatcctaaaaatttaataaaaataataatggatacagactaggtatttcaatgaatacttatttagatgaagaaaacagctttcaacacattacaaagggcaaaacctaacaacacaaacattatgaaatccagaaaattaattaatatgttgttaatatgcacacttctaccgtatttttctttttctacaagtttttacttaatattgtttgatcttctctttatcagggagtaatattctaatatcactttggtagggaagctaaaagcataattcattcccctagcatcattgatcagtgtttattttccattattgcagctggagtgcacggtaaatgcaatttcaacatgtgatattattgtttgtagtgctgcgggcttatgctcacaaacccaggcattctgatgcttctgatgctcgattcccatcacaagaaacaaaaacattataatgtatttataatcttctattctgtgttatcgacaagctctttacagggggggaggggacttaaactttcattagacattgaaacaactctcaaatcttctgctaatgaaattagacaaatttgaggtttacattttgtgtgtgtgtgtgtgtgtcaggccagatatttcacccttgtctttcctctgctcacagattttcccccagcactggcagatgcaccactctgagcctttcacctctgtgctgtgaagccaggagagccagttcttggggaaggttttcctgggactcacatctacaatagaatggactagaatagattactaccctggaaggttacttaaccatccattacactaaccctgagctaagcagctcctcagttaatggtctccttacctgaaaggagaacaaccctttctcctgtcagcaacaggaggggaaccataatggagggaaatctaagtgggaagacagtgcttttggacaatggtagccaagattctggaaagatctgtgtgaagggctggctccatagcctgtagtactgaggtgccaagggcaaggtcagaggccactggaggaatgcccttggaagggaccttgttttttttctctctttgcatcgtagggacccatgaggcgagcagctctctggcctgcatgcctgctgagacacctgccttatcacaggtccaaaagcaacaggaccaactgactaaaacctcacaaactgtgagcaaaataaaagtttcatgtttttcaattaagattgcccaggcatttttttaaatgggagcagaacgttgactaatatcagtgtcttaattttataaattttataaaaatgtaagatttattcagagcctttgcgaggacatgtaagtgggcagacatgaagcctgactttcattaaccttaccgtaactatctacttgtcagtttataatatatatatgtcaaatcagagcagcaggggggtgttttgaaatggatgacagcaaataagaccgattgagactgaaaaccattggtgtgggttttgagaaagagaaatacactcaaaaatgataaacagaaccctgaacacagtcttctcgctagtcctccagcactgttactgtgcacagacagtagaggttcaaaaagacatttaggcaaggatctgaccctagactaaagctcgagatgtgattagaacattgtgatgctgactattagaagaaagtatattgtcagaatattaagtagcattctctggcaattatttaaaccaggtttctcaggaatttagatttttttttaaacatggcatgtgtgcattttcatgggtgacaaaataaaaatattactatagttattatggtttactcgaataattagttaatagattaccattctatttttattttgaattgtaattcccatctggtgactcaaattgtcttgatgaacctacaatgaagctttcaaattgttcaataaagagaagaaaaaaataagacaatgcaaagcccaccattaagaggctctaaatacagaattgtattctttatcacagctaataaaataccatattacaggaaaatgaatggagatgatttctatccatatgacccaagggccaacaattagaagaaatgtgcaataaatagtaaaattgaaataaaattatattcttaatttctaaattggatttataccagtttgctatatagttaagtaatgtcataatagcaatgtgtaaaagaagatgagaactacatgtaattataaatgtctgtctcattaaagttagaatttgaatatagcttctttgttaattacatagtatgaaaattcctgaaagaagaaactaagctgtggagttcattactaccaattttgtatgttgtattttctaaacaggaagttcctgagtttgaactgtaatggataaagaaataaatgaattaaatacaggcttagatttgacattgatatttctacgattcaacccaatacaaaatttagtttcagtacaacaatattattaatcgtatgtattatttctttgtctagtatacatatctatttatgtaccagttacagtgttacttgctggtaatacaaaaagggaataaaagtaataatttcacttttgtgataatgagtcttctacaagacatctgacaaacaagtaaaccactaaaatgaaacagcttgcatttcattgaagcttggagaaaagaaatgatgttcctgggcagagcacagggtaatatattttaaaaggggaaacctttcgatgagaatgaccctaaaggatgagatacgatacaccacaccaaaagctgagatgaggaatttcaaacagtaggaaattcaaagttcctatgacaaggaagaccatggagatctgggaatttagagaatggtaagacagacgctttgtcagcagagaggcgaaagcatgaaatgagatggaaccaagaatgagaatagactgtgactgcctaaagaacatggcaaggagcatgttttctttgaagggtcttgaaaagctgtgtaactgtttaaagcaggggaagttgcacacatatagacaggcatatgtgtgaatgtataaatatatatttcctggactaaaacaaatatcatatgtgtacaaacaagtgcacatacgtatatggataggtctcaaagtagatacacaatgcacaaaggtattcctgctgtcgtgtgggttgtagacttttagtggatcttacgagtttgttaaattatgatttcattggaataaaatgtgataacttgttccagagagatgttagaggaaggtggatgggttcacagaaagcatctgagataacattaagagaattgatggccagaaagagagatgaagaaagtgtaagcatcgctcacaattttctagctctaatgtctgcgttaatggtgacactgtttattagtgggggctggggaaggactacagattgggaaagtaccagttttagggaggagaattaagggaaatcattccaatttaaaaatttgtgctgtagtatctattttacatgctagtagtactaaatagatagtttagaaaataattgttttactaaaaacataaattaaaattgctggcatatatctgaagtaactgaataagatgaagttggctagaatataaaaataagagagagagtaaagaacaaagcaaatcccaggatggagccctaagaaatgccagcatctcaagggtggaggaagagacaggtccagaaaggacacagagagaacaactcaaaagataagagggtcctcaccagagctggggagagcgcacttctagagaaatggttcatttctgaatcttgctgatggatgaagtcagatgagaagaaaaatgacactgtgtctggaaatgtgtaagtctctgggaattaagcatggttatctctgtggagtgatgtgtatggaagtagagctgaagtggtttaaaaacaaagggaagggaggaagagagggaactcttgcacttaacatcagaaaagtttccagtgggcaggaggggttggaggatgcagggtcaagtgagttcccatttgggggagattgagatggtgtttgttaacttatgatcaattgtcgagtaagcagagagagagtggaagtttaggcacttgacatgagtccttccacaaataaggtaagtggttttcactcagtttgattgatatttttgagaaaatacagctgtttctgccataatacactgttaagtttaattttttaatcttttctcttttttgttttgttttttgagacagggtttctctgtggctttggaggctgtcctggaactagctcttgtagtccaggctggtctcgaactcacagagatccacctgcctctgcctcccgagtgctgggattaaaggcatgagccaccatcacccggctttaatttttgaatctttgtaccttgcaaaaaatactaaaacaagataattaataatttagtattaattagttaatactaacatttgttgtgaatattagtttaagattgctacattcacttacactatgggatatttgtttaatgctgcaaaagtgtgttgcattattatctgttgtatttgtttgactctgtaaagctgtgttactttgtctgcctaaaatacatgattggtctaataaagaaccgaatggccaatagctggcaggagagagaaataggcagagctgccaggcagagagaatatatagaagaaaagtaggctctgagaagatgagggaagagcaaaaaaaaagagaaggacagaaggatgccaggggccagccacccagccacagactaagaagagaaaaaagacatatagaataaagacatgtaaaaatctcagaagaaaagctgactagaaacaagccaagctgaaggcaggcattcaaaagtaagaataagactccatgtatttatttgggagctgagtggcaggcccccaaagagttaataaaaaagaaaaaaaactacaaagattcctcaagaaaacaaaacttaaattgtataaaatccaccaccagaacaataacatttgagtttccaaaaaaattgaaactgtaagtgaatttctggtaaataaattaacaatggataaaggacatgatcagttccatacacaaaaagcaagaggggtttctggttccggttctaccatctgatgccagggacatctgatgccaggggtctgctcaccggatccaaacttggcagcagaatccaacacacctagacactgccaaggcccgggtaacagtcccgcctccatcctcctgcccaggtaagccacaagctgtttctggttctggttctgccaccctgcatggggatatctgacaccaggggtctgctcactggatacgaacttggcaggcaggatacaacacactcagaaactgccaaggcctcggtaacagtccctcctccatccacgagaagagcacagacatcagagtattggaactgtctgcatctaccagaagggaaccttggtcgcatacccaccaggagaggaagagactcctgcttcacccaccagaagaaagaatgagaagaggacaatgtaaggacacatcaacaacagaaaacccaatatgacaccaccaaagacgagaaaccatacaccagcaagacctgaacattacaatgcagatgaaccagaaaaaaaacatcttcatgaaaatgatagagaacctcaaactggacatgagaaaatcccttaaagaaatggaagaaaaataaaccaaaaaatacaagatatcaacaatctctcaaggaaacagttcaagacctaaaaacagaaatagaaacaataaagaaagcacaatctgagggaatgctagaaatagaaaagctggataaatgatcagcaactacagacacaagcataaccaacagaatacaagagatggaagagagaatctcaggagttgacgatgcactaggagaaatagacttatcaaccaaagaaaatcttaaatccctaacacaaaatatccaggaaatatgagataccgtgaaaagaccaaacctaagaataataggtatagaagaaggtgaagaaatccaactcaaaggcacagaaaacatattcaacaaaatcatagaaaaaaattttcccaacctaaagaaagatatgccaatgaaagtaaaaaagcccacagaacagcaaatagactgaaccaaaacaaaggtctcttcgccatataataatcaaaacatcaaacatacagaataaagagaaactattaagagcagcaaaggaaaaaggtcaagtgacatataaaggcaaacctattagaatgacacacgacttttccatggaaactctgaaagccagaaggtcctggatagatattctacctacactaagagaccatggatgccaatccagactacaatacccagcaaagctttccatcaatatagatggagaaaacaagatattccatgacaaaaccagattcaaacaatacatatccaccaacccagccctacagaaaggtctggaaggaaaactgcaacccaagtaagttaactacaaccagaaaaactataggcaatagataatcccactttaccaacagccaaaagataaaagggatggaaacctacacataatttcaccaccaccaccaaatacaaaacaaacaagaatgaataatcagtgttcataaagagccctcaacattaatggtcgtaactcacttataaaaaagacacagattaacagaaaggataagaagacagaatccatccttctgctgcatacaagaaaaacacctcaacttcaaagacagatagtactgaagaattaaaggttgggaaaagatttgccaatcaaatggacccaagaaacaagcgggggaagcaaccctaatatccaacaaattgaacttgaaactaaaatcaatcaaaagagatgaaggaggtcacttcctactcatcacaagagaaatccatcaggatgaagtctcaattctgaacatttatgccccaaatacatttgtaaaagaatctttattaaaactcaaatcacacataaaaccgaacacacttatagtgggagacttcaacatcacactctcaccactagacaggaacaccagacagaaacttaacaaagaaacaaaggaactaatagaagttatagtgcaataggcttaacagatatccatagaacattccatccaaatacaaaactatacgccttcttctcagtgccacatggaaccttctctaaaatcgagcacatacttggcaatagcaaacctcaacaggtacaaaaaattcaaataaacccctgtatcttatcagaccaccatgctttaaagttagaattcaacaacaacacaaactacagaaaacctacaaactcatggaaattaagtaacacccatttgcacaattcctggttggaggaagaaataaaaaagaaattaaagatttcctagaattcaatgagaatgtagacacaacatacccaaaccaatgggacactttgaaagcaatgctaagaggaaagttcatagcgctaagggcccacatgaagaaacaggagaataatcacactagagaattaacagcacaactgaaagctttagaacacaaagaaaccaatacatcccagaggagcacaggccaggaaataatcaaattgagggctgaaatcaataaaatggagactaggagaacaatacaaagaatcaatataatgaagagttggttcctcgagaaaatcaacaagataaacaaacctttatccaaacttagcaaacagcagagtgaacatgcaaatcaataaaatcaggaattaaaaggggaacataacaacagacacagaggaaatccagagaatcatcaggtcatacttcaaaaacctatattcctcaaaattcgaaaatctaaaggaaatggacaattttctggacagatttcacttaccaaaattaaatcaagaacagataagcaatttaaattgacctaaagcccctaatgagatagaagcagtcatcagaagtctccaaaccaaaaaaaccccatggccagatggttcagtgcagaattctaccagaaattcaaggaacaactaataccaattctcctcaaagtattccacacaatagaagcagaagggtcattaccaaactcttttatgaggcttcaataacattgatgcccatgccacacaaagacacaactaagaaagagaactacagaccaatatccctaatgaacattgatgcaaaaatactcaataaaatactggcaaatcactttggaaatcagtatggtgacttctcaagaaaatggaatcagtctaccacaagatccagcaattccactcttaggcatatacccaaaagaagcaaactcataccacaaggacatctgttcaatgatgttcatagaagcattatttgtaatacccagaaactggaagcagcctagatgcccctcaactgaagaatggatagagaaaatgtggtacatttacacaaatggagtattactcagcggagaaaaacaatggaatcttgaagttttcaggaaaatggatggaactagaagaaaccattctgagtgaggtaacccaatcacaaaaagacaaacatggtatgtactcactcatatgtggattttagacatagagtaaaggataaccaggcttcaaccagagaagctagtaaataatgaggaccctaagagagacatacacggtcctctagggaaggggaatgggtcaagatcccatgagaaaattgggagcatgggaagaggtggcgagggatcgaggagaatgtgaaggggagaagaggagggatgcaaaggacatgagggagcagaaaggttgagtcgggggaagaatagaagataacaagaatggagataccataatagagggaaacattttaggtttacagagaaattaggctctagggatatgtctagagatctactaggatgacaccagctaacaatctaagcaacagaggagaagctaccttaaatgccctccccagataatgagattgatgactgacttatatgccacctgatagccctcatccagcagctggtggaagtagaagccgacacccacaattaatcactgaactgaacaggaatccagatgcagagaagaatgaatgaagagcaaaggggtccagacaaggctggtgaaacccacagaaacagctgacctgaacaacggggaactcttgctccccagactgatagctgggataccagcatgggactgatccagaccccaggaagctgggtttcagtgaggaaacctcggaaatctacgggatctcctgtagtagttcaggacttatccttagcataggtgtggactctgggaacccattccacatagaagtatactccctgagccaagatacaagggggtgggcctaggccctatcccaaaggatatgatagactctgatgacccactatggaaggcctcaccatccagggggtgcacaaaggatatgtgacaggtagggttttagttgggggggctggtgtgggagtggtagggaggatgggagagagaagggaactgggattatcatgtaaaacaatcctgtttctaattcaaaaaaaatctgaaaaaatttttaactaaattttaaaaaaattaaaataaaatactggcaaatcaaacacatcagagaaatcatccagcatgatgaagtaggcttcatcccagggatgcaaggatggttcaacatatgtaaatccatcaatgtaatccaccatataaacagactgagggggaaaaaaaaacacatgatcatctcactagatgccaaaaaagcctttgacaaaatccaaaaccccttcatgataaaggtcttggagaaatcagggataacaggtacataccttaacataataaaagcaatatacagcaagccaacagccaacatcaaattaaatggagagaaaatcaatgcaattcctctaaaatcagggacaagacaagtctgtccactctctccacaccttcaatattgtccttgaagttccagctagagcaataagacaacaaaaggagatcaagggcatacaaattagaaaggaagaagtcaaactttcactatttgcagatgatatgatagtctacataagtgacccaaaaaactctaccaaggaactcctacagctgataaacaccttcagcaaagtggcaggatacaagattaactcaaaaaatctgtagccctactatataccaatgaaacattggtggggaaagaaatcagagaaacatcaccatttacaattgccacaaacaacataaaataccttgggcaaaggacactgtcagcaaggcaaaatggcaagacaaacggcagcccacagactgggaaaagatcttcaccaaccccacatctgacagagggctgatttccaaaatatacaaagaactcaagaagccagtctccaatacaccaaacaatccaactagaatgtggggtacagaactacatagagaattctcagaagaggaatctaaaatggctgacagacacataagaaagtgttcaacatccttagccatcagggaaatacaaatcaaaacaactctgagataccatcttactcctgtcagaatggctaaaatcaaaaacaccaatgacagtttatgctggagaggatgtggagaaaggagaacacttctccactactggtgggagtgcaaacttgtacagccactttggaaatcagtatggcaactcctcaagaaaatgggaatgagtctaccacaagatccagcaattccactcttaggcatatacccaaaagaagcacactcatacaacaaggacatctgttcaacgatgttcacagcagcactatttgtaatagccagaaactggaagcagcctagatgcccctcaactgaagaatggatagagaaaatgtggaacatttacacaatggactactactcagcagaagaaaacaatggaatcttgaagttttcaggaaaatggatggaactagaagaaaccattctgagtgagggggagcagaaaggatatgtgataggcagggttttagttgggggtgttcgtagcagagaaggggtgtgagagggaactgggattgtcatgtaaaacaatcctatttctaattcaaataaaaaatatctgcaaaaaaaaaaaaaagcaactgggagaaaaaaaatgtgtataacattcccaagtcagattcatggcaaaacttgaccaggacgaaaaccctggaaaaccctgaagtgggtaggcattgtgcaggcactctgtatttaacatagtccactgtcccagaaggtttgctttcagggacttttcctacaaaatacaacacattatgctatgaaaacctgtgtgagctaccttccacattttatcattctttgtctcacaaaaaaaaaaaaaaaaaaaaaaaaactaccttgaatttcaggtacaaatccattgaatcagaaaaatgatgtagagttgagtttttgcttttttgtttcgtttaggtttttgtttttacttactaaacagctgctttgtgcacagcagcacactgagtcagaaactgtgtttccaccacttatacacaggaatcctatgaactgaactctgcttgcaccctggttctcatgaaaaacagaagtcaaggtcacatagtgattggcagagtcaatatttgaagctttgagacctaagtctggatatctaggatcttaaacatggggaagaaaagctttcaagatactgtttcaacacgattgctataaaagctgaaccctcctcaccatcttcaataagctaagatcacacatctaaattttgccctaattataaagctctatattaccaggacattcaatgctgctagagtttaagggaatagtgggaaaggagtggtaggcccccaaagggttcgaggaattaacctatgcagcaccattttgtgtgccattaatttggttgtcctataaactatgtatacacaatttaacatgacaaaagcttaagactcagatatactttccccaggagagacagtttggttgatggggactataataatgagaggctgtggagtgggcttccttcagtgagggatgggtaaaatgatagagtctcagatgggtagattatttttatagatgtgaagatgaacatgatggcgatatagatgaagaccccacattggaacatccagagaacatcatttgataataagtaaatgagaacatgattcaatcatgttagactaacagtgacacctaatgcaaaggaaatccctctatttgttcaccttaacttacaatgtggagttcatatacaaaacagcagttaggacaacacaaagaactgtcagctgttcactatggatagttgccttattttccattctctcttctctcctcccaaacaagaggctgatgttagaagaaagaaagtataggctaccacctcccaactcatcaagacatgggaactattaacttattctatccagatggcaatgtagtggtgtataggacactgaattgtgcacacagttttgtgtaaaatttaaaattcaaattcaaaaataacagacttgtgtttattaaccccagtggactattttacttataagaagcaattaaaatgctgtggaattggcctaagatgtcattgagcaagcctgttgccttatgagaataggaccacagaactaacttcttaagttaataattcttgtatatagctcaccagttgagactctttccaaaataatgacccttgtgaaatggaaaggttggactccatgtgcttcgaggtcctctatgggtctgacatccaagtgtttcctagcagtgaggagtacaggttcaagaggacagaagctagttatgtgggcaatatggccctgtggtggtgcccaaagagcagggactcctgctgcctgatggatgagtccctcattctcctctctgactggccaggtgacagttcaggacatttagaaaccttgccttctgttcctctatctcaaagctggtggaggtgaaaaggaaaagtagtaggaggcagtgacagatctgaaagcagaagctgaagaaagagaggagtaaagcaggattgatgcaaacatgaaggatttgtaaggaggggaggttatttccagttcctagtcagtttttgtcaaaagtcataaagtattaaaaacaaaaccccagaaacattaaatagaaaaataacttagagacaaccaatttaaatggcttcattttgtactgagtaaacactacagaatggtttgtgggaactatatatataagtgattaatccatagcaaataaagaacaaaaataggtttctgccactgggataaagcagtcatttttgctactgctttggtggaagatttagaaccaaggaaagaataggggaattagtgttcatttgcactctggagaaggatgtggagagaaagacaatgaagtgagaaaaacagaatgaacaaaacatgccaggtaggaaccaccaagaatctaaatcggagtgatggagtaaagaatgaacaaaatcaatccatacccagcatttcagcatagatgaggagagggtgcatgaggtcccatgccagtggaggagctattggcaattgatggctgttgggaaagggagagttagcttttgttagaggtgtgattctggtaggatcatattcatagtcccatggatgatccatgcatacataaacagcactaattagactcaatgacttatttaaaaacagaacataacatgaattccagagggaaaaatatgggagaaatcagagaggaattggagagggaatgacaagcaaatatgattaaaatacattatgttcatgtataaaatcctcaaagaataaattttaacagttatgtttttttaaaaatcttagcatagtctccacagacaagactctatgtctccaccacataagctgcaaattacagtggtgggctcactaggaatggctctgacccatgcctaagactctaacaaagctcagagtaactcagaatgttaacatgctcacttacatttatatgtatgccctgcagagtcatccactgagtgtgacaccatcatcttcatctgagcagctgtgactacttactaggaaccttcaaaatcaagcctgttggctgttgacatcccttcattaaatagggtgtagggaaggtcattagaccttcactgatgtctcatccagtccctcttgtacctcccgaacagttacatatgattctgccctaattgaacatagcctcatggtctctatagtatagtgtggaaggttaacaaaagttagtgtagctatgagaatttatcaaccatgctggggtgacactttcaatagtacaactactttggaatcacccatgctctgtaagtagcatctaccccacactttctaagtaagccaaacacacacacacacacacacacacacacacacacacacacacacacacacacacaatcaatcatttccctagttgttcttcagtgggattatactttggcctgtcaatggtgtcctataaggatacaacagagatttgtgtttctccccactcagggaaagtgctcctggaaaggtatacaagatagtcatctccaggtaactttcacttcttggtgtgtatgtgtacatcgtgcattgaaatgaatgctagcggctatttattgttctcatgggacttcagtcttacctaaccatagcatgtatcaaatgtaagaaaaaagcatattttctaatctggctcttcattatacatataatatcattgaactgactgtctacatacatttgatcaacttctctttacctggacctcactctagtgcagagaatgtttaaattttcaataaatacttattagagagataaatgaacaattaacacattgatttttacatcaggatgttgcaacctaataaatcttctcatcctacaggtgactatttctgtatacacattaaagaggactagagagtgctggaccactcttcatctccaattctttatcctttattggagctaccaatcttatctgtgcatctgtgcttaggaaaaccagcccctaggacatatttttagctaatttctatggtaattagcatcatggactgtttttctttatgactgatggcctgtcagtcttttcagaatatgtaaaatgactttataatcctgtctccaccattctaaccattggatatttgactttaaatttaattaactggaaatacaacatattgaagtgaatacatgaagaggaagatgaaattctttgtgctgtcaagtcacagtctatagttgctcatcatcccagttatatgactgaagaagtcagcttggcccttccttttacaatttgtttatgaacaaaatccctagtgtccaaaaactacaagcaatttgattctatatggctcattcatggcagcgtacttgcatgcaaatgttattatgaaatgatacttagaaattgtggccagaatgaaaggacagaaaatagtgtttattctgcatcatttcttttatcttctaagcataatcattcaagccttatgtacatactttccctttttctctactttagagtgtcaattataagttagctgcagttttcttatacaaccccatcctgtcatatattctcatcatttcacatccagcataaccataaggcacaaggttattattagttcatgactatttgtaggcaggtatcattaacaaatcaagcaaagtggctttcacttttccccactgtttgaacttcaattcttgttcctagcttacatctcacctaagtaatgaaaaaaaaaaacttctgtttctaaaaaatctactaacagagatatatgaattacatagttaagaatttagcaaatccaccagccctaaagagatattctccaatgagaattacctagatgaaacccaagacacaaaattttaaagaacagtaataaacttcatgagagaattcaaggtgtttaaagaagacacaaagaaatggcccaatggaacttacaagaataaacttaaagataacatatgggtgagtgatgcccaagaaaatataaccataaggctgaatgaaataataaagacaatccaggatttggaaagtgaattcaataaaggggtaggaataatgtttcctggtagaatttcacaagtgacttatgtatattatcatggcatctgaaaatggtggaagtttgacttcttcctttctgatttgtatccccttgatctccttttgttgtcttattgttctatctagaatggtaagtactatattgaatagatatcatgagggagattggtctgtaattctctttcttggttgagtctttgtgtggtttgggaagaaaattcaaatggaatttgtattagttacttttctgttgctgtgataaaacactattatcaagacaaccttacctataagggatgaagggtttattgggcttattgttgcagggatataagaatctatcaccatcacagcagggaagcatggcagctggcaggcatggcagcaggaacagctgagagctcatgtcttgaatcataagcacaaggtagagaagggatactagaaatggcatgattctaaactccaatgcttcctccagtgacaaacctcctacaacaaagacacacacacacacacacacacacacacacacacacacacacacacacacacacacacagccttccccaaaagcatcaccaatatggacaggcattcaaatgctcacgactataggacacatctcattcaatccaacacagaatttaaaacttcaataactcaactaaaaaattcaagggaaaggcttacagagagaatggatcaaatagaatatatcaggagtcaaagataaaatagagaaaccagaccaaacaagaaatgaatatgaacattttttaaatacaggaaaggaacatgcaaaaaatgtgggacaccatcaaatgatcagacctttgcgttatggacatagatgcaggtgaagaacaccagtgcaatggcataaaccagatattcaacaatatcatagaagaaaagttccccaaactaagaaaagatatacttacacagatacaagaagcacacagaacaccaaatagaaaagaaacccccacatgtaatagttaaaacactaaacataaagaacaaagaaagggtattaaaagcttcaaaagaaaaacacatgtcaaatatttatgaaaaccaatcagaataacagctgatttgtcaatggaaacattagaaagccaaaaatgccaggaccaatacactccaaattctaaaaaaccaaaatagccaaactaggttattatacccaacaaaagcaaaactattttctattgttaagaagaaagaaaaaccatttatgcttcaaacaggctaaacaaaatacataaagcaatagttggtagtgagaggagtaaacataaccaagagactacaggaagataacaaatgatgctgtaattactgaaacgcaaagtgtgactatgaacacaaacatcaaaaagaaaatgattgagatcaatacacacctttcaataataaccttaaatgcatattttttcattacagtcctctgtaagaagaaccttccttctctgatgacagttgagagatgcattgacctatgcaagtggtagtatgatattttgggggggaggttcgagacagggtttctctgtgtagctttggagcctatcctggcacttgatctggagaccaggctggcctcaaactcacagagatccgcctgcctctgcctcccaagtgctgggtttaagacatgtgccaccaacgcccggcgatagtatgatgctttaagtcattttatttctacattcacatagcaggaaaaatagcttttttacttaaagtccatgacctatccaatctctggttcttggcctcatcaaaagtaacaagatatttgaaaagggagtaagaaatcattattatttatttacctaaattacctaaaatacataaaagtctatgtgtatacatatacttgtgtggtttagatgaagtcatgcactttgggtaggcaatgttcccctgaggagccatagactaacaaaaaaaacaatacaaagcattagaaattccccttagagtttttgatcaagggattcaagagactcttaaaacagtgttaagttcttgctgttgcccttgtttgcctcctagaggttgaccataaactcttattgctaaagacactatgcacttcagatgaaggagaacccgggtggatcttatctgaaagcttccctgaggactagattttgtagtatcggaaagtgctacccagtttttatgcctatgaactaaaacaatgaccagttgacctgcttaacaagatactcttaatggtacagtagtgccactctaactttggtgataacaagagctctctaactggactttaaggcatactcaaagggggtggagggtgggaatcattcctggtactagattcttagccaattacctactactgataggccatgggtcttacaagagaacctattaccaccaccttactaaaacagtgtaattcctaatcatactctaaatacttatccttatagccacagataagtgtaactgtcacccttcatgaaagcaacctctctttaaaacataaggagaccattacaaaacaaccacaatcagtcaaaaagcagaaagcaagagcttacggggtgcccagctccaatggatacatctacatcaaaactcctgcattcaaggctcagtgcatcacaaaagagggagcagaaagattgtaagagccagacaaaccagaaagctgctgtgagtttgtatctcctagaaatggcagggaagtttcatccatgataccgcaacaatatggctgcctaaacaagacccaaacaaggacaataccaggagacatgctaacatggaaggggaaattacactggaccccatccctagacaaagaacaacgggcaactgatgactgcagagagaaaccattattctttaccaggaataagtcctataattggttaattggttatctaataccaagagatcagccctgaaatcatatacataatagtagcactaaatggactaagaaggaggggtgtgtgtgtgtgtgtgtgtgtgtgtgtgtgtgtgtgtgtgtgtgtgagtgtgtgtgtgtgtgtagagttgtgtgtatttttgttaggacaattttgggggtatttcgagacaggggttctctatatataatccctggctgtcctggaactcactttgtagatcaagctggcctcaaactcactgagattcacctgcctctgcctcctgagtactgggattaagggagtgcaccaccaccacctggctagaacatcaaattttaaaaagccatgaggtcaagaggaagcaaggctgggagaagctgaagagagggaaggtgagagataaaatgatataattatatttaagtttttaaaaagaatatgaagagaaaggatcagttctgccacagtatataactgacagtctttctacacaaactcatagatcaaatagacaaaagagtaagaagacagaggatttgatattatgacaagaacatatgttatgagatttacagtattttatgccaaacaaagactatatattttctaaaatattcatcaaatggtctaagtgggcccagtgaagctattagatttttaagacagtgctactcagatatgcctctagaacagcactgatcaataaacgtggaagagagagagacacacatgccagaacacggttcagttctctcactccacacgtacttagatccactagtctatgaagtatgtgaaaaacaaagaggataaaatgatgtagtttaacctcaaatgtgtttcaagtatgatggggtgtatatgaattcaatgttaaattgtagaagttaagataattagaaaatatcaaataaaaagtaaaccagtagaataatgtgccaagattaattgaattaatagaaaggaaaagaataaagtttgaagaaaactctgagtccatcctttaaaaatgccaacactataaaccaggccaagggaaaagagcaaatgtaacctttgtcaaggctgacaaggctctggacaaacaagaaacctgatcccaggggtccaaagaatagagctcagactgtgacggtagagcttttagatggtggaggaattcagaagtgtaggctgaggttcacttccaactgtatcgggtaattcaaagtgggagaaagacaaatgagacacccctgggtctacttcaactatgaaatagaaatatgactacttcatgatgatggtaaatgactctcactgccagtactcactaagctgagaccactggaaatcactttgaaaaagctgttttttgtcagctgacggatcagaatacctgttacattcctaactttcccttatttctcatgtgaaaatcactgtattgatgaaaagtaggttattgaactataagatgtgagcagtctagaaggccaagcagtggaggatgatgagtccctaccacacaataaaacaattcccattccatatgtcttgctgcttcctgctgtatctctgaagtcataaaacaagccccattgtacccagccttttgttgttatactacaatatccagaattggtaaccaaaaaagggatgaggaaaatcagattaaagagatatgccaactgggagggattgcagacatctcctgatatcaatggatgcattcatcagcaacaatgcatgtaaagaataagattttgcagataacacataattgttaaaatatattatgagagtttgggaaatgctctggattggcctgaacatcacaaaagtacaaagaaaccaagtcaaacacagcagaaaactttcaaagactacaggaagtaggaatattggatatacaatataaaataatatataatatatgtactatgattatacattataataattacatattatatggtacttacataatataaaataagattctctgatgcattcatgggtagattagcaagaaaagaactgaatattgaaaaaaccaatctccctagtgggggatatggtttttttttctatgtacagcccttttaggcaacatctaaaatcaaaatggagtggcaagaatcctgattgtagattgaccagatgacagaatgggatcacttgaagtaagttgggcctaaatgttacagtttccaaggttctttgatatagtgcttccataaggagctgattctttctttgtctcaccctatgaaggtgtcagaaaccagtcaggcaatagtatagtcccaaacacaaaggtaaagaaaatctcagacaagtgaatatacaacttcctcatctggtacatttgactattatgtgtatgagagtatctcaggccctagctcttgaggccaagggaaatttcctacaatggggcaatgactcaggaagactgccttctgtgatagtaagtgccaagcaaagtcagtaagtattattttgtcttctatagtagtcaagtgaaggccaagttgcattcttggtaaggctgaatgcattatcataaccatcaaagatttgaaagctgcaagtgtgttaacatcagttaatttcttccactgcccttttttcttataatatgaagtattaacttcaaggccttgtatgagctataaccttacctactaatttatttcttaataatgtttttattaagattttcatacagtgtattatgtatgaaattatgtattatcatattcattccatccccaaactctccccaggccatccctacacctctccctctcacccctctccttccccatcccaccaacagcccttctgctagggtgggacctcgtgcccacctcccctcctccaagctagccatcttctactttctatttaataaacagaaagtttattattatgcaaaaaacatggaagcaatttgtcactcatccccaccttgagaggtacaatattttttgcaatggtaatactgttcgacacctctgaacttacagtagccttacccattcatctccatcaggaccccaatccagggctgcattggtgatgttacattgatagggcctgggaataggaagtagcaagtgttctttgagtttaataaggactatatgataagttcaacaaaaatggaaatatacctacgattccagagtggccattcagaaagaataccagacttaagttcccatagaaattcccccatttcaggtaatcagggatcgattttgctattgccaaatactctcttactcactcaacactgactaataaattggaggaccaggtagagaatatgcataggctcatggcatggacttctatttgccattcctaaatcagttaagttaatgctgaacttaatcattctccagtagaaattgacatcattatctgtcatgaatgaaggagaaatttttcctccagaacaaacatatcagggatcaatacttctttctctgtgtatcacatatttgccaatacgacaacagagtcctgcataacagtgcctctgtcaaaggcacacatttagcaacaaaacaaaatgggtaatctgatacctatgggaagtcattttcaagctgctttttttttcttttttctttttctagtaaagacacatacatatatgtatgcacataaacccaaacacacacacacacaccacctttcagcccttcatcagtgtttttaattttgtatgaaatataataaataaattgttgtaagttaaaaatttaatccctaaatttttaaatactgtatttaaattcattttataatatatttaataattcacaatgtaaaaagacttttatatttagcaaattatatgctattcactttaaggtaaatatgaatatctaagtgtattataaaagctaatattatagcacaattctttggaacccaaatatagaactctgtaaatatcgcattgttcaatatcatcctgacaatgattctctcttaatttgaataatgtttaatatgccacataaggggtttaattaactgaataccacttaaaaatttagtaagatatcttgaggtgaagttgctaaattattgccattaacttatacttcaacagcaggcttcattatggttcttgtatttatcaatagtccaccatgggtgcaaattaaatagcaagcactatgaataaaattatttaaaactacacaatgatcaagccataaaccaggctttctgagcaaattcatctgattgccattagccagagtgttcattgaatatacactcaaaggagacaaaactgtcccatttccaaatgaaaaactagaatgcattaaataatttattagctgcttaactaaatgctgttactatttttaaacacacaaacttatttgaatgcagctgtgagccactagatggaaaaggcggatacacaccatcacaagtttcagtcttgggctctgctctgaaatacatgtcgggcatctgtcttacaaagtgtctataaacacttaccagaagctgtggatgtggcttcattggtagagtgcctccctagcattgaggaaggccctaggtttgatcacatcacatagctggatgtgatgataaacacctctaattccagaacttgaaaggtagaggcagaaggatcagaagttcagaattgtctatatggtttggctatatagtgagttcaaggccaagctaggatacataagaccctttctaagaaaagaaaaaagaaagggagagagggagggagggaaagaaggagggatggaggccacctcttactagggaccaaatgaatgttcactcccatctgaaaatcagagatcggttactttaacataggcatctcaacttatttacaattaccttaactaatactaaactggcatggagtcagctttttaaaaggcatagaacattagttcaaacttcagtaaataaggcaatctaggtaaaagagaaacaagtaatcaacatgttatggaaattttagtatatatgccacaaatacaaacatcagaaaaaaaaaaacagcaaagatttcactgatttgggacaaagaacagtcactaggccactgtgtgatctccatggtattgagaagaaaaaaaaaaaggactcaggtgactaactggtactgtcctaggaaacagggctactgctcagaagtggtaactatacatgtcaatgatttttcaagaccaaaggagatggtctaatcatgccccctttctgtctctaaacttccctactgaaactgtactccatgctggaacacattaccccctaaacacggaagaacatattagagtgaaaccatgtttgtcataaagatagcaaaacatgggctacctggaaacatccttcttttaactgttaatataagacaacctaaatccttaatattcagtaatgctggttgcttagatacatcaggaatgaagagaagtccactaggggaggaaaatcacaatcgtatcaaggtctaagacaaggagaatgtaaattaccaaagtcagataaaagccaaagttcaagaaagtctgtgaccaaaaccataaatgaggactgtggcttccctctccttccctttacttactacacagatataactaccatccccttctcttcagcaccctgaagaagaattccgtttttcattcttcgccctcctgttcccattggccatttacacaccacgtgatgagtttagtgacatttacatctcatccacaggtggcagaaatgttaaccataataacaagctagagaaagaaataatggatacaacccatagtgcctaagttcagggatattgaagaaggcaataaatagatccaactttgcattatttccaacccatacatgcagtagagatgcctatcctatgagatctgtgatctgagatgatgttataacttggatgctaagtgccctcaagtgtccatgtgttgaagacttgctcctgggagtagagctgttaagaagtacatagacttttaggagaggcgaagtctttgcatctctgagaatatggtgctgaatgggactgtggtaccctagccactttctctttcctgtttcctgtctcatgagaggggaaatttagctctgccacacgctcctaaccgagatgcaaccccctcaccagactatcaaagcaatgggagtcacagggttacagacaggaagatccaaaacagtaatcagaaatcatcttttctctttatgcattaactgtctctggcattttgttacggtgatagaaagcagattaatttagtggcttagagctaactggaacttaacctggagtgtgtgaatggcagaaactgaaggttctgagtcactttagtgacaaggacaaggtgagaaaacacagagatttggctgctaaggactgaataacagccacaacattgtgccactgatcaacaaatggccctctcaattctgtgagaaacttcagagtcctttttatttcattcctgtgttttcagagtcatttatattttacatggatttgtgcatttgttgctaatataacaactggtacaaaaataataaaattacaatccaattttcaacatgactattttatgaaatgttacaagctaagtctgaaattcatctagaattcaaatgcatgagagcaaccaagaaagtgtaaaagggggaaaataataattggaaaatagccctgacaaatatcaaaacttcctaatttaagtatgttattgacatggtagtgcaccaacagatgccagaaagaaaaattccagaagatccacttatatgtgaattcacatcataaaggtaaatatttatttttggtttttcgagacagggtttctctgtgtagctttggagcctatcctggtgctcgctctggagaccaggctggcctcgaactcacagagatctgcctgcctctgcctcctgagtgctgggattaaaggcatgtgccaccaacgcccagcaaaggtaaatttttaagtaagtaaaaaaataggtggtagaaccaaacaaatttcttacgaaattatcaacacatgctaattgcaaaacttcatgagtttcggtataacatttccatatgtgcacactgatcattagtcatgtaactccctcttctacctttccccaccctcccctttactcctttcccagacccatgtccagtacctaatcattctgctcctacttttagattacatttacacccaggcttattccatgtcttgattgttgaggacagtttcatattaaagtgagtatagcaaaggatgctccaccacaccacaaggacacttattcaactgtgttcacagtagctttatttgtagcagccagaaactggaaacaacctagatgtccctcaaccaaagaatgaataaagaaaaagtgatatatttacacaatggagtattactcagctgtaaaaacaatggcataatgaaatttgcaggcaaatgcatggaatgagaaaatatcatcctgagaatgattatttctgtcatcccagaaagacaaacatggtatgtactcacttataagtggatattagctgtaaattaaaggataaccaatctacagacccagagaagctaagtaacaagggttcaaagggggacacttgggtctccctgtaaagaggaaatagaatagactttgcaggcagactgggagcaggtaaggatggaaacaagaaggatcgggtagggatctggaaggggaaaatcctggaagagacaactagaagaaggggggcatcttggggtatggtagaaacctagtgcagtggaaactccaaggaatctccaagggtgactctaagactccttgcaatgggtgatatggaacctgaagtggccatctcctataaccatgcaagacttccagtggaggtattgggacacaaactcagttatataacctttgatctacaatttgtcctgcctacaagatgtgcttgggtaaacacaacacagaaattatggtagtgtccaattaatcactggtttagcctgagccccatgccgtgagagggagtccacctctgacattgcctgcagtgcaaggacccagaggctagataatccagagaccgaggatagaaccaaacacaacttgcaaaacaaaagttaatgtaatgatgcctaatgacattctgctatactcatagattgatgcctagcccaaatgtcatcagagaggcttcttccagcaactaatgtaaacagtgcagagaccaacagccaaacattaggtcaaacttggggaatcctgcagaagagagagagaaagggttgcaggtaccagagtggtcaaggacaacacaacacacacacacacacacacacagagagagagagagagagagagagagagagagagagagagagagagagagagagaaagagagagagagaatcaaccaacttgggcacataggggctcacagagactgtactgacagccaaggagcttgcataggactgacttagaccttctgcatatatgttatggttgtgtagcttgatcttcttatgagactcctaacagtgggattggggtttcagtatgggtgcatgaaaagctagagttttatatgtggattttgctagatttctcagttattataaacaaaatgaacattaaaatgttggagcatcttttgcaatatagataaagcagaatctcaaatgcttgtgatattcaaagtcttttgaaaatagtgggattagaagacattttacagactatagctatgtagatatatgtagacatatatacatatatatgtatatttaagtggggttttcttaataaaacataagaacaatcaaaaatctaagaattctaactttctatataagtaaaaaataaagagtggctatattggtggcacagcagttaagcatgcttgctaatctaggaaactatggtttagttaccagcgctctctcatcaagtgactcacaaccatctacaaccacctccaacaaatctgacactctcttctggcctccataagcacttgcaaacatggcatatgtacacaacacacacacacacacacacacacacacacacacacacacacatatatagtgtaaatatatttgaaaagatataacattaagaaccaacttatagacttgtaaaactacttggcatacatcaaatacaatagacagaaattgacttgaaaataatccctatttataaatagtttaacaatgtggtaggaagatacgtgaagcacttgaagatgttcctcatactataaatatgaatggctggcatgctcagacctctggaaatggagaacatacaaataacgcaataattagacttgtctctaatgcccatactattggggaaatatttaaagtttgaaattaccaaccgagaaacactgcttctaatagaatacattttgatggaaatatcaaatttttacattatttacgaatgacaagtaagcaattactagtaaaatctagcaactccatgttaagtatctgtcattaagaactatagatgtgggactacagagataaatcagtggttaagagcacacactgcttttgccaagcacctgggttcagttcccaacacccatgtcaggtgtctgacaaccatctgtaactccagctgcagagaacctgatgtcctcttctggccaccacagccaactgaactcgtgtgcatatgcacatacaaaacatacatgcacaaaatttaaaataaaataaatgtttaagaatagaaatacagctttccaacttgggccctgcagaatggctcccacaaagaagggtgtcgagaagaagggctgttctgccatcaacgaggtgatgacctgagaatacaccattgacattcacaagtgcatccatggcatgggcttcaagaagcgtattccttgggcacccaaagaaatctggaaatttgccatgaaggagatagggactccagatgtgcgcattgataataccaggctcaataaagccatctgggccaaaggaataaggaatgctccataccgtatccatgtacatttgtccagaaactataacgaggatgaggactcaccaaacaagctgtacacattggtaacctacgtgcctgttaccacattcaaaactctacagaccgtcaatgtggatgagaactaacctgctgagtgtcaaataaaattggagaactgccttcagggtttggttttcgtttttgtctgccccacaggtagaatatttgatactgtttaggataggacctaagggctattgttgggagttgtttaagactgctgctctgggtatgtacttttcatgggaatcaatgtgttagaattgtggtttttcaagacagggtttctgtgtggccctgactgtcctggaacttgctttgtagaccagactggcctggaactcacagacccatgtacctctacctcccaagggctggaattaaaagtgtgcactgacatgcctgcctggcttgttgtggcttttaagaagctatagtgttaggtctcattttaggttctgggtgtatgtgagcctaagattgaagttataacagttacgtgatactgaaaatttgtgttgcttgggtcctgggaattgaacttggttggtcagccttggccttctagccatctttgccaaccagtccattccctggaatatgctatattctttggacagcattttgttttgtttttcagacagtttctctgtgacagttctgtagaccaggctggcttaggatgcaacatagatacacctgcctcctgagtgctgttgttttttggggggtggaggggttatttttaaaagtcagtacaaaaagaaagatttttattaaaaaccttggggccaaaaaaaatagaaatataaaaatggcacatgaaagaagtaaagagacttgggaggatacaaaaagggatccgggtagcaggaagtgagaggggtgaatggaaaggcaaattagtaaacacattttgttccaaagaccattagaatatccaataccttgtatgctaagtgtaatcattaacaaagatagacagaaatacagataaaaattagatggagtggtacacacacgcaatctaagtgcctgagaactgtaagcaaaatgaaaccctgtttccatagaaagagaaaaagaaagccaatgagagaggagaggaaaggaaaggaaaaagagataaaataaatatacatgcatgtacacacaaacaggagatgtgtctcggtcagtaaaatgcttgcctatcaagcatgaagccccagatttgatccacaagaccacacaaactaggcctcccagaacatgaaggtataagcaagagaatcaaaaactgaaaatcttcttcagctacttgaagtcagtctgacatgcataacatgagagagagagagagagagagagagagagagagagagagagatttagcagtacagttggcctccagacctaaaagtttcacattcatggattaaaccaactaaagcctcatattactgatacttgtcttggtcagtgttctggtgctgtgaagagacatcatgactatggcaacttttttttgcagatttttttatttgaattagaaacaagattgttttacatgtcaatcctttccctcccctcctcccctatcactccccccccaactaaaactctacctatcacatatcctttctgctccccagtgagggtgaggccttccatagggggtgactttggcaactcttatgaaggaaagcatttaattggggctggcttacagttcagtggttgggtccattataatcatgtcaggaaacatgacagcacacaggcagacaatggttctggagaaagagctcagaattctacatcttggcaggcagcaggaaaagagaataagccactaggctggcctgagcttcagaagcctgaaagccccctcaagtgacacttcctccaacaaggccacacatattccaacaaagccacaaatcctaatcctttcaaatagtgccagtccctgtgaacccatgggggccattttcattcaaaccaccatacttgtgtctttgagtatcaacaggctttttttctcattaatcctgttacaatgtagtatatcagcactgtatatcccaatcacatttgattagatttcatgactgatttagagatgtttttaaggatgcacataggttccatgcaaatacaccaattcatgtaaaggacttgaacatttgtctatttgactatctgtagggtagtcctggaattcattacatttcctacatacacaaaggaacaactgcatactacgagcaacagtaaaatgctggagacataacgcatatatacaataactatattcaaaggcaccttaaagaccaaaagtgacaagttggaatagctggagttgaaagtgggcatgataggctctttaagatcccacagtgtcattcccagtgaatgaaccttacaaaatctctgttaatagaaaaatcctggtctgggagagaagcttgtagaaggaaaatacatgaaagcggcagtctaagggctcttgtgagacaggctggccggtgcctggaaacacaatgatgactatgggagcagtaacatgggtgtgacggacttcataggagaaaataaacctggcaaaggaaataaataacacacaaattcggacaagagaactatgaaccaggaaaatggctgtggccatgaaagaaaaatggttgctttagggaacaaatcaagaaaaaggagtctggaatgaagaaaatgctaagaagctactagaagcagaagggaaagttaaataatgaatgtgaccactccatcagttggctggggctaccagtacaaaggaatgcagacgagggagcatcattagaaattcatttcttcccagccctggagggtgggagtctgagtccatgtcaacagggttttcgggctctgtccttgacctccagatggccattttctgtgtccctcatggtgttccctctgcttgtgctgttctgtagtgacattgcgttagtgttcactcacatgacttcattgcccttcattatttcttaaaatgccccatgttagggtcactgaggcaatcgagggtaagacataaaatgtaaatttggggcatagaaacccaattcagcctatggaaacatccttatggttccagatctccttccaaaacatcccatctgcctcttcccactatacttttaatgatacccttctaatctgacaggactcaatttagatcaaatttccatagggatgtctttcctaacctacataacctcagtcaaatttggattctctgtttcagtttcttatattatctgtggtttccaaaacgtgtttactatctcttttttacgtgttacatttttatgtattgattttgtggggatacacatgttaccactgtgtgtgtgtgtgaagatgcacacgtttatatgtgtgtgctgtgacagtctgtatataattacatgtctgtgatggttgatgcttgtgtgtttttatagctgtctgtgtgtgagtgagtgtgcacacactcatgagttggaaagcagatgtgtgcatgttttatacgcatgtacacatgtctgtgaatgtatgtatactatacaagcttgtgagtgtgagcatgtgtgggagtatatatgtgtgtacttgtataagtgtgaatataggcgcatgcctatatgtgcatgcatgtgtgcacaagtctgtgactataaataaatgtctgtgtgtgcatgtatttcacgagtatgaatgtgagtgtgtagatgtgtagaggagtgtgagtgtggatacataattgcacatgtgagtgttcctgtgtgagtatagagtgttcatgtatatgggagagcatgtttgtgtttatgcctagggttgtcatatatgtcagtacgcatgtggtcattttgggcgagggtgtgtggttgtgtacatgtgtgaatacgagtgtgtgtgtttaagtgtacgtgtgtataagtatacatgagagtatgttcatgcatgagtgctcttgtgtgtgagagagagcgaatatatacatgtaatggcatgagtgcatttgcatgattctgtatgagtgtgagggtgtgaaggtaggggtgtaactatatgagtgagtatgcgtgtgtgtgtatatgaatgtgttttcatatgtcagtgtgcgtgactctacatatttgcaagagtgtgttagtactcacatttttgagtgtaccaacatgatgtgtaggagacaagtgtccacgtgaatgtgcctgtgctcatgtgtgagtgtggatgcctgtgagcaaccaaccatgtgtatgtacatgggtaagtatgcatgtgagtgtgtgttttgtgattatgtgcatgcatgaatgtatgggtgtgtggctttgtgtgagtgtgcatgtatgagtatgcatgggtgtgtatatgcaaacatgagtgaatatacatgtttgtgtgtgaatgtgtgcatttgaacatgttatgtgatgagggtacacgggtattttcatatataagcgtctgtgagtgtttgtgcttgcatatgtgcttgggtatgtgcacatacgtgtatgcatgtacatgtgtgagtatgagcatctgtgtgtgtgattttgctataaatgcattcatatataaaatattttataacaagtccatatataagaggctgcagagatgactcggctgttaaaaacactgactgctcttccagaaaacccaggttgaattgccagcaccatatggcggttaataaccatctgtaactaaagttccaaaggatctggtgctctcttctggcttcagcaggcactaggcacatagttaatgaacagacatacatgcaggtaaagcacacatataaaacaaaataaaaattaaaaaatacatttcaaaaaatataaagaagtctatgtatacttaaattttaactgttttagtggtgattaaattagtttgctgtgtttatagcaaaaaaaataataataagtataataccaaaacaattttcaaggtggtaggttctagtctcccccatcatcttgtgattttgcaataacaaaataacaaaaaggtgagaaccactaagatgttccaaaattttaaaccttattttgcaaaaaccaattgacagtaaggggctagggtaaaggctccatcagttaagtgcctgcctcacagcatgagagctttaactcagaccccagcagccacatgaaaagtcaggcacacataaaagacgaacacaaagctcagtacacaatagtactcatacacaaaggaatgatgataacagtaggagtagctgggatttaatgaaaggctatgatatgcttgagcagtacagtgttacatgtcactcattaaaaaggatactggaaatgtaaaccttggtgactggaatgtaatattataaaatatacaagctgaacaataagttagacacaaccacaaaatcaagcagtgagctctaatatcagcccttaaaatttactcagaaaagaaaaagctgaaagcataggaagaaaacagttgaaaataatggagcagaagtttgacatccatctgctatgtccataacaaagaagaaagcagtgtcacccaaaaagcttagattccaagaaaaactagcagacggtgttgtcttcaattgcagtaaaaagataaaatgaggttgtctctaacaagtgggtccatgatgacaccaaaaccatcaaatcctggcacctgatcacagatgactatattggcagagacacagggcccaagttgccatgttaaaattttcttcccaaggatctacagctatcctagtgatatggatcccagtgaatgagatttctgtcaccctgggagacccagaaaacagatacatagactatgagaacagtcacattgccaactgtcttcattactgctctattgctgtgaaggcaccataacttatatacagaagaaacttataaaagaaatcatttcattggggactagtttacggtttcagagggtgtgtccctgatcatcgaggtggggagcatggcagctggcagccatggtgctagagaagtagctgatattatccacggacagcatgcaaagagagaggaagaagagagagagagagagaaagagaaagagagagagagaagctctggcatgtgcctttgagacctcaaagtccaccccgcagtgacacatcttctctagcaaggccaccccacttaatccttaaacagtccaccaactgggacacaaacatgcaaatatgtgagcctatggggccattctgattcaaaccacaccacccttcccttcctcactttaatcagtcaattaatcttcattctctgggctattccagtatcaaaaattcctttgtagttaagatcatttgcattttatatggattcgttagtgagacttctaagttttgttttttgctaataaaataccaactggtacaatggcaaaaatccaaccaaatcctcaaatgatttttttttaaattaaacataacaattctaaaattgacctggaaaccaaaatgcccaggaattactgataaaattcaagaaagaggaaatggtataagattagcctgtgaagcttcaaaacataaaataacaacactgtgacaatgccctgggttcaagaacataccaaccaaaggaaaaaaaggcaaatgcactagtacaggaatttggtgtatgtctatgagaacgtctttctttcatcttcaaacttaagagatagttttcatgcacacaaaagtttagtttgggaggtattttttctttctttctttcttttctttcactacatcagcccactgttttctgtcctctatggttttttgtaagtgagctgttggtcacattgtttccacttttctcttactgctttcagcgttttcatcttgcttgatctttaacaaattcactatagtggatctatgtgtggtttccttgtagctattctacctggaatttgctggccttcataaggacatttttcagacattttttcttaaaagtctgaaagaaattattcttccaataatttctgttctctcttcctgtggtgttaccaagaccacaggggtctcatactgtcattcctttcaacattatttttttcctatttatttaaattagaaacaaggttgttttccatgccaatcccagttccctctccctctccttctcccctgacccccaccaaccccctatcctatctcctttatgctccccagagagggtgagactttcatgggggatcttcaaaatctgccacatcatttggagcagggcctaggccctccctcatgtgtttaggctgagagaatatccctctatggggagcaggctcccaaagtccattcatgtactagggataaatactgatccacagccagaggccgaatagattgcccagttctcctaactgacacccatattcagggggtctggatcagtcctatgctggtttcccagctatcagtctggggtccatgagcttccccttgttcaggtcaggctgtttctgtgggtttctccagcctggtcttgacccctttgctcatcactcctccctttctgaactgattccaggagttcagttcagttttagctgtgggtgcctgcttctgcttccatcagctactggatgaaggctctaggatgtcatcaatctcattgtcaggaagggcatttaaggtagcctctccactattgcttagattgttagttgggatcattcttgtagatctctggacatgtccttaccgccagatttctcttttaacctatcatgtctccctctattatggtatctcttttcttgctctcctctattcttcctcagactcaaacttcctgctccctcatgtcctcctcacccctcctcttctccccttctctttctcctaactccctctcccctccccccatactccaaattagctcaggagatcttgtccctttgcccttctctgggggaccatgtatgtctctcttaggtgcctccttgtttcctagcttctctggtggtgtgggttgtaggctgctaatcctttgctctatgtataaaatccacatatgagtgagtacatatcatgtttgtctttttgtgactgggttacctcactcagggtggtttcttctagttccatccatttgccttcgaatttcaagattccattgctttccccccaccccgctgagtagtactccattgtataaatgtaccacattttctttatccattcttcagttgaggggcatctaggttgcttccagtttctggctattacaaataatgctgctatgaacatagttgaacagatgtccttgttgtaggaatgtgcttcttttggatatatgcctaagagtggaattgctggatcttgtggtagactgattcccattttcctgaggaaccaccatactgatttccacagtggctgtacaagtttgcactcccaccagcagtggagaagtgttccccattctccacatcctctccagcataaactgtcattggtgttttttttattttggccattctgacaggagtcagatggtatctcagagtcattttgatttgcatttccctgatggctaaggatgctgagcactttctcatgtgtctttcagccattttagattcctccattgagaatttgctatttagttctgtaccccactttttaattggattatttggtgttttggagactagcttctttgtatattttggagatcagtcctctgtcagatgtggggttggtgaagatcttttcccaatctgtgggctgccattttgtcttgctgactgtgtcctttgccttacagaagcttctcagtttcaggaggtcccatttattaattgtccatctcagtgtctgtgctactggtgttatgttcaggaagtggtctcctgtatgaattcattcaagggtacttgccacttcctcttctaagaggttcagtgtggctggatttatgttgatgtctttgagccatttggacttaagttttgtgcatggcgatagatatggatctatctgcagtcttctacttgccagcatccagttatgtcagcaccatttgttgaatatgctttcttttttccattgtataattttagctactttgtcaaaaatcaggtgttcataggtgtgtgggttaatatcagggttttcaattcaattccattggtctacctgtctatttttgtgccaataccaagctgttttcaggactataggtcttcttctcctggtaggtagaggtccaggttctcttccgatgggtgcaagcaggtccaatactcagatgggtctcacgatgagtgcagacaggcctgagacactccctctcctgatgggtggaggcaggactagcaccatgatgtcagcagactctggatggctttatctgcctatggagagttgacctgcctacagtccccaagccaggagatcccaaagagggcaagcagaactcaacattattctttgctttgaactagccccaggtccttgtaaaagttaggtaagtattctactactacagagccacattctcagcccttatagtaactattttgacctatttggctcataaatccaatttctagtaaaagctaagatctattaaatacttttccctgaatataagccacatttttatgggttttgcataatattttgttgactacttgacattttcactaatatattgaagcaatactagattccgattcttttcccctaagggctgctactgtttgtttgtttggtggcatgtctgcaataagtctgtgcagtctgtctacccagtaatgtgtgggtgcttttatagttgcatacactttcatctttttgctcatttctaagcctggactcctagaactgaggcaaatagtgtccggtagtagttttaaatacttgaactaaagcttgctgatggaaacatgtgtgggcttcagaacacatataagcagcagactgttttgaagcttcactggcttttactttctatctggccctttcacatctcctgaatatgaccgtccatcctacagaccaaagattcaaggcctagaccattgtcatgtgtatgtgcacacaaacttcatctaacccaagatgaatgaagaattcttccaatcttttatggtagtctcatttctcagaattccccttcaaattccatatggtctcctggtctgtaggttggtcctcctaggaacagcttcaggctggccctccctgtttgcttaccactgagatcgccacctaaaaggacagtgttcttaatcaaatgagaatcttctggcttctgcagagaagtccttggctttgtgtcggtccacagaaaatccacatatctagcaggggtcgttcttctactctaagcattcctcagttgcctgtagttctttgtgtagagatgagtccttgtgggctttcccccatccacctagccacgtctgttggtgtcatccttgtttagttcatgtttggccagtcatgttggtgagactttattggtgtagcttctgaaattagtaagagacacaatctcacagccaactccctgatcatctgcctcttccgatctttctgcctcctcttccacaatattccctgtgccttcggtgtgggagtgttttgtacatgtatccattgggactgggctccataactgcattttgaccagttgtggtgacctacagtgggctccacttgttacaaaaagattcttctttgatgaagggtggggcctacattcaccaggggtataagaacaaacacctcaagtgtagttagggattacactgttttagtgaggtggtggttgtaggttctcctccaacatccatgacttctatatccctgagtgcttgcctaggtttctagtaccaggcttggtttccctctttgaagtatggttttctgcttaattttcagaactacagctaatgtttttgagagttttgtcaagctccacggttgctctttaggtaaaggagctcttggcagcctgtctccattatgatgaagaaagcattgtctgaaatttattttaaactaaatattttcatcttaagtattattaaatactaatacagcacgcaagaccagaacaccagaatagttatagtgtatagaattcataaagagtgaaaaacactagctaatttgcttaattatttcaggccttgttgaataagtatttgttaaaatatatgttaatatatgggtagtcatctgatgaatagactaagatacttaacttctatgtcattaaaaggtatttacaaaaatgtcaatcaaaaatgagggaagagaaggaaattatacagatttctgaatagaaaacctaggaacgggtccaaatctatcagtcatcacattaaatgtgattaagtaaatacatctattagaaattggcaatgttctgattgacttaattaagtgaaactatcaacagtgtttacgagaaacactaaaaatggcacaatcaaggagataataacaaaataggaaaaagaagtgtcagatgaataaaatagaacaacattgaaataggaaaaaatggaacccaatgccaaatgctttttaagaaatgggaacacttgatattaacaattgaaacaatattaatgagggagcatacgtatttgtaatgagaataataatgtttcaaataataagcatgagtgacaaagaacaagcaacctggcttagtgacaagaagtcacaaaaagacattagcaaatatttggcccagttctaagataaagtttcctacaagaagattaaacagggtgtggtggttcatacctttaatcctagcactgggaagtcaggagagacagatcactctaaactatcagccaactggtgagacctagtgagatctctctcaaaagatgaaaaagaaaagtattaaatgtgtttgtggtaatttgaatgtatttggcccccataatctcatagagagtgacactcttaggagttgtggccttgttggaggaagtgcagtcttgatccaggaggctggatttcacatgcctttaatccagaccttgaggctggagggcacacctttaatctgggcaacaccttttgggagtgtgtcactgtgagggaaggcttcgaggtctttttctcaagctttactcagtgtgacagtcgcatgacttcctgttgcctgcaaaatgtaggacaccagctatttctccagcaccattcatgcctgcatgtctgcatgccaccatgttccccgccataatggactgaatctctgaactataatcgagccgccacaattaaacaatgtttgctttatgggagttgccatggtcatggagtctcctcatagcaatagtaacccaagctaaaagagctttttaagatactcttagaaaaataataaaacagttgggcattggtggcgcatgcctttaatcccagccctcgggaggcagaggcaggcagatctctgtgagttcaaggccagcctggtctccagagcgagtgccaggataggctccaaagctacacagagaaaccctgtctcgaaaaaccaaaataaataaataaaatatagaagaatcaaaatcatagtgttaatcccatgcataggacatatgcacattcatatgtaatatatatatatatatatatatattgtaaatatatggctattcatggaaaacagatatatttgaccacatattggcaacaaagtcaatttcaacatggtccagaaagcaggtattacaagtgttatagtcaatagctacaatacattaaactaggaataaaagctgacaaacaacacccccctaactcactggaaacttaaattctactagctttcaaatatacaatatattgttattaactatagtcaccattgttgaacttatacctatgccattactgtgactctaaatccttttacttgaatattgttaacagaataaactttatgcatcctaactacacaaaaacttaaacatacagagtagtgtatatggtaattagctagatttaaccattctaaaacttccaaaacatgaatacaccaaaacacactgtatgccatgatttaaaagttaaaaatagatttaaaacaaccttgagaatgaaaatggttacttaaacttaaatgagttaaagttgcatatgaatataaacacattgtttaaaattattaaaatctaaaataagggttgggagctaaagaggcagcttaattgttagcagggcctgcaaaataaagggctagagaaatagctcagtctacaaactattcgccatgcaagcatgagacctgagtttggatccccagcaacacatgaaaaattgaacatagtggcactcaactgtaatctcaacacgagggaggcagagatatggagatccctgggacccaaatggccagtcatcccagctggaagttcagtgtaagaccctgtctcataaaattaaggtggagagtgtttgaggaagacatctgatatcaacctctggcctccaaatacatatacccagcacttgcatgcatatgcccttaggagcacatacttataccacacacacacatacacacacacacacacacacacacacacacacacacacacacaagaaatttaaaatgcaatgtaattttaattcaaagaactaaacgttatttgaaataaaaatcataaaacaatgacaaatcaatattattaaaatataaataataaatattaatagaatcaaacattaaaagaccaaaccagttactagaaaaaaactaataaaatagatggcacttttgatcagtgaaggaaagtatactaagcaatagcaaaaattatcaagacaaatttacagtgagaatgctttgtgtaacttctatagcaacaaggtgaaacgtaaacgaactgaacaatgtttactaacagaagaatttgcaaaatttgaaaaaaaaataggcacgaatgcttacaaacctgaaccacaggagaaactggaaacatttcttcttcaggcatatgcctcccgggtggatcacagttcaagtcccagcttactggggaaccttgtgttcccagcatataccaactgtttgaaaatacagaacagagaaaaaagccaaacagctacctttatattgctaatataacaggcacaagctctaggccagaaaagcataaagaagctgtacaccattcttacttacataaaagtcctattaataggaataaatcaaagtaatcactgtatgtgatgaaggtagatgcctatagtaaccagccagtatccactccaggattgcagcaatgccatagaagaccacaatcaagatactctatcccattaactgagaaaaacgaaaaacatcaagtaggtacagaaatagaatgtaacaaaatctgaatccatttttacattagtaaatttaaaatagagaaaatatctcaatttaacatagttaaaatgctgaaatattgcaagcattgcaagtcaggaaacaaaacagatgccttctgtcacacccaccgttcgaatcagccagaagtcttagcagtaggcaacaatgctatttttaaaagcataaatattgggaggaagatttacaactaccatgcttggaaacaatatgattacttatctagaagacccaacacagtccactgaaaactagaagtcacaagaaagcaacctatgtctggtcagtgtcttggtttgcttttacttgctgtcataaaatactgaccaaaagcagctggggagaggaaagggtatatttggcttacagctaaaactctgtcatcaagggaaaccaacacaggaactgaagccaagaccatagaagaacacttcttcctggcttgctcctcatgcttgctcagcttgctttctgggatagttcaggcccacctgcccatcacaatgggatgggccctcactgatcaattattcaagaaaatgttcgacagacatgcaaacaagccaatctaataaaggcaattgctcagctggggtttcctattcctgggtatgtctaggtttctgtcaagttgacagcaattattacaatcattaaataaaaaaaaccaatagcattctgcacaaaagtaataaatcactaagagactataatcaaaccaactttaattgcaaaaaaagaaacaaacaaaagtaattaaacacaataagattaaaattgaaaaggtggaaaaccgctcttacaggcatcaaatcacattataaagtgtgtcatctggaatagcccattactggagctgcaatggaacacgatggagagtcaagggcattctaatataaaatgaatagtacagtgacattttagagaaggaaaaattatcccgctcaataagtagtattggcagaatcagctgtcgatttagaagcaaaacaaagttactgcccaaccttaaggctttctcgattattcatataaaaatagaagaaatatatatgataatttttgaattggtcataaaagactaagacctaagacaaaaacataaatggcaaaaaagatattgatatatttaattatatcaaaaccttaaatgctatgaggccaaaggtattaaaccctgcaagatgagaagcagataaaaaagaggttttcaaagtgtataactgacactacattagtatctgaattttaaaagcacttcttaaaatccagagccaaaagacaaacaagtcaaaagaaaataagtgtaaaaaaagtttgcatgtgaacatctaaattcaagtaaagagagatgcagaaattctgtgtaattgtaatccagaaaaccgttggaagggaagaaaactgtttagaaagcaaatttctaaataaactaccatttctgttacagaatataatgttaataagatatcaatatttatgagaggtctgcaaaattgttgcgtcttaagttgctaagaaatacttatatttttatgtttaacaagagacagaggaataaagagctgatttttatcttgtttgattttgtcttcatctatagtctaaattagtgcttgtgtgcatgtgtgtgtgtttcaaacatgggacgtgtacacggcaggccagtactctaccactgagctacgtccaccaccctttctttattatttttattggatttactcattttatttctgtgttagtgttttgcctgcatgtagacatgtgcaccacatgcacactggtacccacagaggtcagaagagggtgtcagagctcctagaactggagttagagatggttgtggatgaccacatggttgctgagaatcaaatccagggtcaatgcaaaagcaacatatgctcgtaaaggctgagccatttctccagctccaccatgtctatcactatcaagtctgaattatttgcaaccctaagaattaaatgtccagagaagtcttactctttgtcatgtgtctataattccagaaatcagcagctgatgctggggttggtgagttctaggcaaagcccatgtcctcacacgccccaaccccacagcaagcaagcaacagagctgagacagcaggggcgcctcacttgtccttgctctacacctctttctcattcttgttcttgcaggttagtacaagaagtctatgcttgtgggtttaaactctgcaacaagcccaaaaagacactcttgggaggcaacccctgtgttctgtaccttggtaactgaagataagaaagtgggaccttccaggagacccataatcccttcaaagagtttccagaagcaattgaggtttcagaaaggccaccatttatgctaaggcaaaaatcacttgaaggtccttttaattttctgatgtcttttaagctagtccattgaacttggaacggattgaaatataagaggtttcagctgagcaggctgcattctgttaagtgatataaattgcatgtgccatttaacatatctttatctctgcagattgtattctaataggtaaatttatcttttctgtatgagacttccttgctgattcctggaaggtcggtgtgttattattcaagcctttgctcaccagaagaggaaaactgaagagacagctataaaagatgttcgggcctaatatttcatcactggagaggagacagactgttgtcctgatggactgttgttgcctcacatgtgatgctgtttaaggcaaaacagtacaaacgatgtgagagttccaagtccattcacggcattctgctgccctccgagagcatgtgggcaagagctccacgccttgaacagacgtaagtatcccataggaaacgagcaatcacactgtgatcctaggaaatgagcaaacacacacaaacagcaaaatgtaggcttcgtaagctgttacgataaatctttccgccaaaagccaccgagccccactgccacatgtgcactttccgccagccacccgcccgagttagggcccaaatgaatacacagaaacttgtattaggttcaaagctgcttgaccaatgactaggattctcatctgttagctcagtcttaattatcataaatctatatattttataagacttatcggatgccttattggcatccctccttgctggtggatcacatcctgccgctggagcaagagcggaggggaaaaggaaaagggacccttcctgtttctccttcgcttaaatatgagtctccttgctatgtcacttcctgcctggatcaccacttctctactacatttcccagaatcctctttgattcctagttctgtctaacttgctgtctcattggcccaacagtattttatttaacaatcaataagataaacatacacagtacattccccatcagtaagcagaatgagaaattgccccccatccctgtgcctctaaaagctggagtcttgtgtttaaaagaaagggcaagttccaagggactcacatggaggtggaggaaagcggtctttttgtgagaatgtggagaaggccattagaaagatgggagcacagacagggtagcagggtactcacacccaacagtatgtgcccagcctccaaaactgcattcatctgggtgcatttgccttccctatacattcattggttaattatcttagtctcaaatattctgaagttgaaagtagtggtttacctactcaaaaacttaggcagtaactatacattgtttccttcttggctttatttctgtttgtattctaaaatctgaaataattgagaaaatgtatgtatgtgcctttctcatccatttttaatttgtcaattaaaatgtctcatcacagcataagtaattatatagtctttggcacacaataagcttggatatcttaaaaaatgtgttacatcatatatgccaatgaatattaagatttcatatatttcattcatttgaaaatgcactagcaaattttccagacagtcaaagtttacattattccttttttttcttagactcatatttccagtccatttcccccacagaactttatcataatgtaaatttaaatgcttcaaactatgttattgatcactatattataatgacctgagacaacaataaataaatgaataaattaaaaagcatttttacttaatctccaatagccaaatggatctaaattgtaaagagccttttctgaattaagtaatcatttcaatttttatttgtacgtagttttgataaataattttaaacataaaagcatgtttgggcaggaaatatgcttcctaataagataaatgagccttttttagaaaattaatttacatatacatggatgaacattcttcattacaatggtaagacaggagttgtcatcaattttattctctttttaatgtgcacatgaaaacaactgctcccatagacaactagatgtaaatgcaagaagctttattatagtaatgtctttcattagcttttaatatctttcaaactatgtgcaaaacaaaagtcacctctccactgacaatctgatgaagtcttccttcaaagttactgaaagcaaagaggtgaagctacttaagattggaacagagcggttgctaataactacagtcactttctcaataccagcaccagcactttgagtggtcccctttcatggcccctggatactttttccatttctccttgaaatgctttcatctacctccagtttgcaagcagttgaggttcgtgagagcaactacacagtaaggggtgctaacagagacaaatgctgtctgcaaaatgcatgcggagttagcttggtagcgggtgactagctgaggtgacaaacatttatgcaagcttatattattccatagagatttcaagaaattttcagagataaaaactggatttcatggggagaaggtgacagctcagttgtaggtaaagtacttgcctttcaaatatgagaggctgagctctgtcctccagaacccaggcctgatgcctgctccgaatcccagtgtttaggaacaaagtcaggcagctccctgggctcaatggccagtcagtgtagccaaatcggcaagttcaaagatggcaagagaccctgattcaaaaaggtggacagcacctgagaagcaacactcatggtgtcttctggcctccacatgcacaagtacacacacacacacacacacacacacacacacacacacacacacacacacacacacacacacacacaagcacatgcccagatggatttcctatagtcaatggaggggacccttggtgtctttaatgtgaggaaaaagaagtgagagagcatttgacttttaaatgtcaaagaaaatacagctgttctcccttagtcttttgaatcaaccaaaacaacaaaagaaccgaaaggcaagctcaacttcaataaagctatggagtgttactcttctgaatctcacatagaaagaggggtagtcatgcattagagatgggaacataccaacccaagatgtggctgctgatggggggaaagggatagagtatgtactcataataaatttttaagacagtctgtagctttccatctattacattatcaaaaagcaattcattgagatgccttatagttgttttgttcttgttgttttgtctgtctgtttgtttgttattttacttactgtgtcctgattccagccctatctgtctaaataaactcagaggtacccctgatggcaccccaccacaccttgtttctgccccacaggagttacagagtggaagctgcccagagaaagaataaactcccttttcctgtttctttctgttcctgccagcaacacaccagtccagttttcacctgcagactcactgtctggttactgcagacccagagtccagtttgcaaggtttccatacttgatcattcgtcctccaggttccccatctctaacctaatcagagacccttcaggaagtttggtcttagccctccagggtccctccaagcttcatggtaccagctaaaccatacccaatccacagaggtctgaggccctgtattaggaggctctccatcaagcttctaaattgatcatttagcatctttgtttgttactgagccctggagatggcaattgtttcctgtaatcaatcactaaactctctctctctctctctctctctctctctctctctctctctctctctctctctctgtgtgtgtgtgtgtgtgtgtgtgtgtgtgtgtgtgtgtgtgtgtgtgtgtgtgtgtgtgttcttgccttggttctctttttacaacctttggagcttttgagaattctgtatatgaaactaagctggaacagtgggaatggattcagactagatcttaaccatgtgctatgaaaggtatagagatagagacggtctctgatgctggagggaggactgataatccctctggtggtttaggtgtgaaatgtccccatatttgttttgacacttggtccccctacctttgtggcactgcattgaaagactctggaacctttggaagatggggcatggatggagaggatgattgtgggacttgagtcatgaggctctagttagattccgtttcctgactgccaaggcaatgaagccagcagccccagttcccacctcatggagccacccaccctttgccttccttgaagtgaggggctgtttctactgaaccatgagttttcttttcttgtcagctattctatcccagacacaagaaaggtaacactccccaagaaagctagcaaataaccgatttcatttctaggaatttgtctgacagatataaccatacatatgtaaaatactgtgtaaagaaatggaaagttgtgtttttacaaaagtgaatgattagaggggaaattaaaagatcaccaataaagaaatgcttctcttcattttttttttttttagaatttcatttcctggctaattttatgtcaacttgacacaagctacagtcatcagagaggaatgagcctcaattaagaaaatatctccattagaccaggctgtaggcaagcctgtaggacattttcttgattaatgattgatataggagggctcagaccattgtgggtgggactgcccctggactggttgtcctgggttctataagacaacaggctgagcaagccatgaagatcaagccagtaagtagctctcctccatggtctctgaatcagctcctgcctccaggttcctgccctgtttgacttcctgtcctgacttcttctgatgatgaacagtgatatgagagtataagcaaaataaaccctttctttcccaagttgctttggtcatggtgttttattgcagcaatagaaaaactaagacactcaaacatgtgtacaatgaaatatgatcatatccaccatgccccaaggcccattccaactcctcttggtagggagaatgctttttgttaagtattgattcatgaaacattatacagaaataaaaataatccttaaaagaacagtataaagtctgagataatggtgattatgaaggaaatgtacaatgtataaacacagtgtagtatttgtagcctctcttcaaatgttttaattacaaaacaatatatgtttgcattgagtatgtctgggaggatgcataagaaactggatacctacagaacaagaaagagaaaaagacttaaattttactgtcaacccttttggacctcatgaattttgtaggatgtacacatattacatctacaaaaaaattaattcaaaaaaaatttaaaatatccagtgggaggaaatgaaggattctctaactcaaatctgcaaagtgtgcaaaaatgtttatctgttctctctcccaaggcaacattaacaagatgttaaaagaataaaaatgatataaactcaccgcaatgaaaagaatgggagagtagctattagcaagtgaaatatttctaaacatttctgcaagcggaaaagtggataaaacattccaaagctgggcgagggaaactgtagtctagaatatatgatgacaatgggagggctgcaggcaagcagggagaaaatctccccaggagagcctagaaatcatcatctagcctccaaaaccaagagcggaagacgcgggtgttagaccctgaaggtcattaagagtgctgctccacagccctcccctaaacctttgatgacactggctggaaaacaagtactttactacttccgtgccaaaaacaaatgcctaaacaaagcgtacttttctaaggaaaattaccaaaataaagcaaataaatggagatagtgatatttgggggctttcaaaggtttagggagtcctttaaattgcataattaaagaatgttcaacctgaaggcagcctcactacacagtcatccgaaaaacatatgagcattggatttttttcttagtcttaaacatgatggatgaccaaagtccattatgtgcgtgtacttgagatgaatgcaacttagaaggaaaatactgagataaggctggagaaaattaactctggaggtggtgcgggctactcgggggacaggagaaaattttgaaataaaactctatgtcagatgtgatgaatggcacaaactcgcaatcccagcacccaagaagataaggtgagagaattttgagtaccaagctggagttacatagaacagtaccatggaagatgagtggggagaatctaaaaattcacaggaaataacttcacatacatgctcccattaatagggaagaaattattattttaaaaatcaatgacataggactggagagatggctcagtgtttaagagtactgcctgctcttccaaaggtcctgagttcaattcccagcaaccacatggtggctcaagaccatctgtaatgagatttggtgccctcttctggcctgcagacattaatgcaggccaaacactacatataataaataaataaatctttttttaaaaaaaaatcaatgaaataacaaaatattaggctcttggaagcaaaaatatgtaattaataaattaaatattatgaacaaaaaattaaaatataaaattatgaaaaaatccctccaaaaattgaacctagaaattctaatacccaagtaacataaattccagaaagagaaagtttcaattagataatataaaagaaatagaatgctccaaacttgacaaccaatttccaaactaagattgtctaccaagtatctaaaacaatgaaaatatttgcacttggtcccaagttctaaaaatttcggattatggaaaggctggaaagatgactcaaagttaagagcacttggtgtactttcaggataccaagattcagttcccagcacctacattaggggctcacaactacctgtagctccagctccagggaatctgacactctcttttagcctctgcagatacctgctcacacctacacatacataaataaaaataaatgataaaaaaaagaatatagaaaaaatcctaaaagtgtcttcagcagaaaaggaatttattaaattacgagaaacatgatggtatcaaatttggaaaataaatgtaaattttaatggagaagattcttcacagtcataagcaaggggagaaaagggtttgggggactggaatgatagctcagcaggtagcagcacttgctgaacaaacattgagacctgagtacaaatccaaaacaaccatgtcaacgcctgggaggaacctcatttgtgccttaatgtcagtgctgttgacagtggagctggcaggatggctggagcttgctggccaccagcctagttccaggcttagccaaagacactgtctcaaaaggattaagcaaattgtgatagaacaggatgtccaatgtcctcctgtggcctctacacttaaacagaagcacatactacatacacacacacacacacacacacacacacacacacacacacacacacacacacacacacggggaggggtattttgatggcctttttgacattaatctgagagagcagaacaaaggcattgtcaggtgtgtaagaacttccctacccttccatggaaaattactttaagatgacttccagaaaaactaagaggtgagccaaaaagagatcaaagaaacaggaaccacagcatagagagtaatgaaaagaagactcaaaatgacatctcttaggccaacctaagtaacaatcagcccaggttggaagaaagagcttagtccaaaaataaggcattgataagtagggagatggcagaagaaactaatgcctttgatttggacatattcttactgctgcaacgacaggaaataaaaggggaaaaaaggatggggaactctaaggaacagcaaaacaaagagaagaaagagataattatatcacttggctccacagtggacaatattcacaaaatcataatcacataaacactcaaaagcttcaggttttaaaatccatctgcagacaacaaagcacataatttttactctgttaagaatagagtgtaactccacaggtgatctgaaaatataagctgtatgaggagagaagggcaaaggggaggagagaaatcacagaaagtattacattagtcttccatcctataaatgtaagatgagaagacagacattttgggatgtgcctctgcctgccgtctggaattcaactaagattacaaagcaactgctgcaatataaggagatgacagatgtggtcaatcagagaatcggtcaagaagcatcacattatctgccctgataaaggtctgtagatgctgttttaaaacgctgcttttgaaaagcagtggctacctccatagacatatgcattttaaaaggtcaaagtggagtagaactgggggtattaatgaggcaagagatcatcacttttctagaaaacagtttttttattaatcttcatcttgggggtgtttatttttttgatttgtggattctttttccattgtagttctctgtttgtggcacagagaaccaaacaaagccaggaccttgaacatacaatattgtcataccaaacagacaatctaccactgagcttcctccccaacccccatctttttattatgggcatccatgagttgggtaaaatatgaatacgtgcataaaatgttaaagaagtgttattacacatattttacagtgtgaaccatccaagttgcaagtaattgtgagaaatgtgaacagggccaataaatatcttataagatcttgtcaacctgccctcagttcaatctccagtgccaaaaagaaaagatgtaccctatgagattatataaacttaaatatccattttctttagaaattttctttcattatttctgcagaaataatgaacaattttaaagctatatgaaatttcctagcaacttaaaataaagccattccctcaaatcccaaaatgttagtgagttaagaaagaggactagcaagatgactcagtgcgtaagggtgcctgaagtcaaacttaatgacctgagttcaatcactgagcccgtatgatgcaaggaaacaagtgactcccacacgtgtacccagtcctctacatgcttgctatgaaactcagatgcatgtgcacacacaatcaatacataaataaaaatggatggatggatggacaggcagacgaatagacagatggacagacagatagagagatgtgcattttaagaaaaagatggaagaaaaaccataaatcactctgtttgggagatgaagagacctgagtcaatgtctcacatctgaatccaactcaccctgtgactttagaaaagaagtcttcctccctgaaactcagtgaatattcatggaaagagagcaggttgccctatcagcagataagatacactgcccactatctcttgggcagtgacaccaccctcccacagtccctgctgaatgtttggggggtacttttgattgtcataaagattagggtacactcctaacgttcaggaagtactccaatggcctgaatatcaggggctttcttctattctgtacagaggtcagatagacgggacagaaatagcctaggttctcaacattagctatgccaagtgagataaatatcctcagtcactatggccattgaagcataacactaagaagctgttattaagcatccaacccatgccgtatctggtttcagaacttctgcataaaagttaattctaaacgttctttgccgggaaaaactgtacttcacttttacagtctaaaatgccactactcctgtgaagacttccttgacagttcatctcttgctgtcctccctagtttccagaaagaataagtggccctttccattgtctgctcacacatgtataacacacttacatcatgggaacataactatacctctgtaaggttcctctcctagtctgagaactcccttgagacaaggtctatctcagtcatgtctttcttatggggttagaccaagaaaaatgctttgaaatagtacacatctgctcagtggggaactagatgttaagaatttaaaagatttcttagaaacaaaagcacctagctttcattgctctgactcttcatatttcctcacagacacatatatcctttattatctataacttgcaaagggcattttgtacaagctgtaggactacagaactaggtctcaggacacattgcaatagggactctcaccaccgtaatctctttaaggcagctgcttatctcccctgcactacaagtgttagagaaagccatccattgttggtatccgctcaagtcttgttggggacttgtcagggactgtcctttcttcttttgtcctcctttgagtgtctctgtgcctttaataatagatggagcataaagggcactaagcatcatccgcagtggtatttgtcctcatcactttggcttcctttttcttgtgttctttctctgtctcttctctcactctcctgttacttcctacatacagaccctagtttgtgtaatggtttttttcacaggcttccctattctgcttgcaccaggtgcaaacaattcctcacccacagctataaaagcatagaaagaggggacactcccactactctcccatctcctgcaggaattccttttgctgctttcaacctggatgcctcctgttaacctcagaaccctcccatgagtttgaccttacctatactctcaagacatctcccagtcttggtcaccacacacccctcccttctgagtgaaggccatgttcagcaatctgcgagagaaaccatgtacttcttatggatactgcaccttagacttgcattgaatacaaagcgtcctcccgatgtggggttttctcttggatcaggcataaattctctatctcagatccttaaaataaaactgtcctgggcataattttgaattggcaatacatcaaatgccacagccaacatggtgcttctgactgccttcaggacccgggcctcacaatctagacagaaagggccctgctgtacacttctatttcctgcatgcaacatgagcaaaaagcacatgctgggcttgctgggttgttttttagctagacagcaagtatggatgagctcactgttattcaagagaaagagtgaacaatacagagggaaaatgagataaaatactatttttagtttggcacagctataccactcctgcatataaactcaaagaactctaagtcaacatgccacagaggtacctccacatccatgcttgttgttgttctatctgtgacagcaagaaatggagctggccgagatgcccatcaacagatgattggataaagaatatgtggtacaaatacacaatggagttttattcagccataaggggaaaatgaaatgacattttcagggaaatggatgtaactgaaattcattatgttattaaaataatccagacttagacaaacaccttgtatgtggagccagaattttaaatttctctccctccctccctccctctcttccctccctctccctccctctctctctctctctctctctctctctctctctctctctctctctctgtgtgtgtgtgagagagagagagagaggataaggagacagagtaagaaaggtgaccatgagagaggagaaagagggtgggtggggaatacatgtggcataaatgtagaaggaatctattagtgaggtgaacaggatcagcaagaggggaatgggggtcagaagaggtcagtgagactccaacatagtatgaagatgccataatgaaacacattactctataagctgacttaaaatagtaacaagaaatattgcccagtcaaacgaataaaaacataatccacagatctccagaataccttaaacaatttgttaacaactcatttgccatctggtagaaaaagggaaactgggccagacagcttggtggaatttttagaccttcccagatttgttcttctcttattccaatgatggccttccctcgctttgctctccttattatacggtgctgttgagaagaccctctcctgtggcctactctcagctcctgtgaagtccagagaagtgtctaggactgtgctgtctgatatagcagttactaactgtggcttctgacatttttactaaaatgaagccagtgcaattgctaaggagtggtacccacctgtgcatagcggtaaccagatacagaacaaacgcttgcaccttcacctgaaatcccctgctcaggactagctaggaggaaccccattccgatctgggctgatgaaagtcactctgtaatggtggcatagaaaggtaacgctgccacagaggatttataaaatgcagaggcaaaatgtcttgcccttttaaatgtggctgaaactcttcctgctatagagcaaaatgcaaactttcaagacataaaatagaggagctatgactgaggtgaagatgtttatggtcaatgacaaggtgggacaggaagcattatagatagaataataggaaggaaattatgacacatgaggtgaacggagagaatccttggggcagagtctacaggtagcataatctggttatattaggggtgtcatcagtgagaatcctaaatttcctgagccagcttctttcatagagttagctatgaaagggtagcaagcaagaatgaggctagggtgcctggagaagaagttgagttatgagaatggcagggttactaacaccccacttccatgaactctgacagagggttaatctctctactcctgtatcaacggggtatagacgagtcacaccccatgctaaccctccaagttttcagaagtttttttttttctttaaggtctcaactcatcttcttgtaaaacagattcatcaactaaatagtggtctctatgctaacacctgcaacctgtgtctattccaccttatatgaaaagggattttccaggcataattgggatctagagataacaagactttctgggaatgttcagataaatttagtgtaataacaagaatcctaataaaaaacagaggcaagagatcaggggaaaaagaaagatgttatgctcttactctgtggtggaagaacgggggagggaggggggctcaagccacagaacgtggccatgttccagctgctacgtaagtatgtccactatgaaaaagggtggtgatcagcccctaccgtgtttgctgtcttgttttcagtgtctggtctaaattctgtccccatagtaagtagtaacactgcctgttgagtaactgtaactcctatgtaaacatgtgatggtgaccagctaagttagcagatacagttctgttcctctacaatatattgaagaacaccatattccaggcacacaggctcagtttcctcatcttgagcgtgcaatggcagacaccaaagctttagggataatcctctatttaatatctgtccttcaaacttctgagttctggcagaagttgtgccggaaactgaaaaaacagaaacacagaggcattcaggaagaatgaagagaagaccaagctggcagaactaggaggtattgggaatcctggttctgctctctgccaaacctgtgaggtacaagcagggtccctgaggaaatggctctgcagtgtatgtacccatacaccttaaggctcgaaacctggaccaagacacctgtgacccatttggcagaagtaacacaaatacagatttcaaagttccatataggcttagacagtggtcacatagggacctccctgccatttgagtatcagtgtaagactccagaacttttccatgaggaggacaatgggtgggaaaccccagtggtgactaaattagaattttcagcaaccctgtaggacaaaagcccagagagttatttaatttgatttaaagcaaatagagatgtgacatttcttgctcacctgagtttattgaataagatttatattcactacataaatggatggcttagtgatttatgctatatccatgtgatggatgaaataataagcagtcattcaaactaacagtgacatacccagagagaaataagcctcacaatgacaaagccccataaatagtgcttattacctgcatttattctctctggacattctcattttaacctaaaactctgggtccattctgtcagggtctctcaatacaaaaatgtctcaaagatctttgtaaaaaaaaatgttcagaaaaatagcaaatggatccattgagaataaaaatacgcacattctatgatgagaagaatgtgtttactatatggtgcagccataattacttggcctctacatgtagaggctacatgtgatgatttgcctcttgtgttcccgacttgtggaggaagaatttcccatgcatgcaaaataaatggaccagtgtctcttctgctctagatgctactttctgggcccccaatatttcacgatctgacacaatttaatcaatgctaccttgatgacttgatgataaagccttagtacatgcttgtgcatcactcaaagcaaagctttagagtcctcagtctgtctaaaccctacttaagctcagctatgacagataccacaaagtgggtaatttattttttaaaaaagttcttcacgtttctggaggttagaaagccataggtcaagaggcctgaatctaacaaggaaacaaacgcactctcaagatgacagcattcatccattcaggagggaagaccctcatgactgaatatctggaagacctcacctctcaacactgctccagtgggagttaagttgtcacgatatgaacgttgaggaacacattccaatcatacataatgtttgagtcattctgtcacactggtctctgagagaagttcacacaccacccccagtgttattcctgaaactttcaaagctgccctcacctatgagagccaaagtaggtactgtctctcaatcaagacagtgaagaggacttgtactatccttccccaagagggaaaaccaatctcctccctatccaatgggaaaaaaaagaatctgaattttctctcctagatggctcagtcctttcaaagggacagcttatttggcttctgtggagccccaaccccctaaatgttgagctacaaatggaaaaagccaatctaagatacacacttagctgtcgtcctatctccagctttttccaaacagcccaaacaactgtcatctcttgtctttagggcaaaaagtcccaaggcaaaccccatatggtcctggctctgttttgtcatctgtcttagttgcattctgtggtgtctactgagcacacaaagctgtgattgaacttattttgtagtagaatgcttgtttttaatttccctgaccccaccaatctatctctgcctgtttctaaaccacagacaaaaaagtaagatgtcctcctgacagctagaatcccttgagatttacacagaacttaagataggatttgcagaatatctgtgactttctctcctctgtccttcctacagaaagttctggcgctatagctgattacctgagggtttcaactgtgtcgtcctccgtgcataattgaaccctgtggaatgagctaaacattacatctcagaagccaagattctcaacataaattcatcacacaacagtgagtcatttaagaagtcatgtccagctaatcataattttctcaaatattccccaaccagaaaaaatgcattctcctattacattcataaactcaacacctctgaataatttgttaagtcttccctcatttcaaaggtaaaataacgttattagggagtagtggttcgatattggttagcctatatataatgacatgtatctcactggaatgtgtttgtacatgttttccccaacctgtgagctacaagaactgaggttgtacaatcttcattgattcattaattcatttattcaataggcatcttcatttcactatgtgccagacactatcctaagccccatttatcagctctgtctcaagagactttaaattactgggttttgtctaagcagaggagaataaaaagaattaagaaataagtaattaccctgataccttcccctaaaacagcaagctttcattcttcatctacttcttcctagggcttcttccatggagcacacagggttctgtcagacatattgcttctcatctcttcaaacccatccaagtgaggggttccctagaacatctctgcacaagaacggaaaagtgaatttgttatccctagccctggttccctaaggctgacattctatctgctctacctggtggtcttggagattcctttctcttcttaatgactgagcacccaaagtggatataaacttttctctcaagtctccatatttcttcatactattaaatgtagaaaaaaacattactaacaataaagagaaaacaatccagagagggaatgagaactggctcatagttaagcatactcttgaagttcacaggatctggcttatcctcctcaagaaagcccggtctatccttcttctaagatgtccatcatgttagatcctcaataaccaggctcctataagaaaggactaagatagggatgagccccacccctttatcctgctcaatcccccatacacacctatcaaaccatcttcttcccagaagctttggaattatcttcatcttttgtgtgaaaatcaaagtcctacctttgcatgaagccatactcaattatttgtttgtgtatcaaaacttaaaatataataactcaacctcagaaccagagatcaacctacagttgtatgggtgttgaaactactgtgccccacttctccttcccagaaactttaggtatatgatttcccatgaatctgagttcccattgggtactttaccctagactgtcaacttgcctcatacatgctttcagctttgactttggaacacccaactcagatcgtacacacacacacacacacacacacacacacacacacacacacttgaaaataaattagcgggcatatctccttccatagagcatgaattacacaatgtggcaaacttgtcctaaacataaaaagtcttaaaagttttatgttttattataaaaggaatgcatatcatacatcaatttttaatatatttaagtatatattaaataatttaggtttgaaattactcaaaatcatttttagataacccaaacatttcccacatttctcaacacctgcaggcaagtccctgagggcggtcacttagcaaacctggactgaactggactcagttagcatttgataaatcagatgccatattcagttgctcttatctctcttggtatcataatatcccaagagtctagacttactcgtgtaaatagaagtagaattcaggggttaatagtcttgtgttttggacacagagactatttgcttacttgcttaattttacattttattttcacatcaaagccatcacctaaatgagcagcttacctgccaatgactgacagtgagtgtttaatgactgcctcatggaaatatgattaacacattttcttattgaaaactaaaaacacttctgtcatttttgggctaaaatgttaatgatccactggtcaatttggggaaaataccactgttagaattttcagcaaagagagccatgatgttgttctccacgacaccaaagttatcattttcatcacatccgcatgattaaagaatttcaaatggctcatggtctctgcaatcaactttctttaatcaattctgaaacaccatcttcattctagtatgtttgttgtgaaccatgaaaactttaatagctttgccttacagctatttattgagaatattcaggctcttacaggttcctaagtaagccaaatgtgtgtgtgtgtgtgtgtgtgtgtgtgtgtgtgtgtgtgtgtgtgtgtgtgtcctcaattattaagataagaatttaatcaattcatctcatgtggatattgatgttttgtgaagacttttttcctcatcagttaaagaataaatcaatctttaatttgtaaactttgactaacacctccacccaattgagtataaatgtatttgatggtaggggaaaaaaacaattttcaaaaccacttcactgttcaaaataagtttctcttaggaaataacttgtttaaaaactgaaaacatttttaagttggtttaattactttgggagaaagctttacttttttgaaaatttcccaagtataaaaagtgattatgtgggctagaaagatagactggtggctgggagcactggctgctctccaaaagaatccaggttcaattcccagcacccatagaataggtactggcttctatgactcccgtttcaaagaatctgtctccctcttctggtctctacaggccacggacatagaagctaacagaacacccatgcgtgtaataaagaaataaaataaaatgaatgttgttaaaagtggttatgtaacgatcccccagaaaaggggaaagggacaagatctcctaagctaattggaagcatggagggaggggagatggagttagaagaaaaagaaagggagaagagtagggaagaagaggacaaaagagagcaggaagatcaagtcaggggaggaatagaggagagcaagaaaagagatgccatcatagagggagtcttataggtttaaagagaaatctggcactagggaaatgtccaaagatctacaaggttgaccccaactaacaatctaagcaatagtcgagaggctaactttaaagcccttctctgccagacctaggatgatgtgatggactttggggagcccccagggagggtagggccctccagaggggggatgggatgggaggatgtggggttgggggaggggagggagaagggattgacatgtgaagcaagcttgttcctcatttgaactaatttttaaaaagaaagaaaaatatgaatcttcaaaagtaaaatataagtcataataaaaaagcccttctctgataatgagattgaggactaccttatataccatcctagagccttcatccagtagctgatggaagcagacacctacagctaaacactgagctgaaccctggaacccatttccaaagagggaggagtgatgagcaaaggggtcaagaccaggctggagaaacctacagaaacagctgacctgaacaagggggagctcatggaccccagactgatagctgagaaaccaggataggactgttccagacccgctaaacgaggatgtgagtttggaggtctggttaatctatggggcctcttatagtggatcagtatttatccctagtacatgaatggatttgggaacccattccacatagagggatactctcagtctagacacaggagggagggtctagtccctgctccaattgatatgacagactttgaagattatcccgtggaaggcctcaccctccctagggagcagaaaagggatagcatgaggattgggggggggcagggaaggaggggagtgtgaaggaactgggattgacatgtaagtgattcttgtttctaatttaaatttaaaaaggaaaaagtggttatgtaaaatattacagccatgctagtctaaattaaataagttacttgagtaaaggaagtttttttaaaaaatttctaagaactgtttaaaattttggcaggaaaaaaattcccatgcgaatattttcataagattttggatggagcttccaatagcgagagtgtagttaaatgtgtggctttctttaagcaagagaaacacattttacacccattcacatttaaacataataaatcctatatttagataggcttctcaaaacatcctaaaccttttaatttggatgttgctgtttactgccaattacaaatgacaaggggtagtttcgtcgtcttctctctaattcaacagggacaatattaatgctcactctgctgtacactaaaggctgcttttctgtattttccgggcgatcctgcttgttttgggtgatttgaggcttgcactgcaagctgtcttcattaagcaagatccattctcacttggaaatgcagtttttacttgtttccttgcagggctagggattgaacacagggcctcattagtgctaagcaagtactctaccccaaactacatccacagtgctttaggttttaaatgttcaaatttttaaaaagaaatcaataatgacagtaaaaattgcaaaattcaaaaatgtaattttgtgctattcaaactaggcaaaaataaacattgttgtggtaaatattttagtggatgtaattttggcaggaattcaaagtaaattgtaaaaattgaatatgagagaaaagtcaaggggaaaagaaatcaaaaaatgttcgggaatctagctgtagatgcctacatctgtaaaattctatatcctctccctgcttcttcacacacctagcccagggaaggtgagaaactaggctcagtggttgggcccagatgggcagccagccctatctgaaccagatggctaggtcatttgaatttcctagaagaaaaatgtgagctgtgaaactgtgagttaccagtccccaagcacacagaagaaccaggactgagagaacgaagagagaaacagaacaaagcaaagatggttgtatccccacaaggttctgggcatcatagtgctgttgctatccctccttccttttggtcatctacatctgagagccagtggagacccagcttttgtcatgtgctgatttagttgagtttcttcccaacaaaacaacacagcacaaaagagctctaaagttctctgtctctaattcagcaaacatttgtgggacacatataatgtaactgagttctacagttaaaaaaaaatactgattaatgtaattagctttggagctctctgctctcagagcatttgtaatctaggaagcattcggacaacatggaggtataaactggctttcaagactgtagggattttccaattgtgaaatgacttgctttagactataagaagtactaaggcaatggtaaagtcatgaggtggacctcacatttgggattagaaagtcaccctgtgtttctgaggtttaaaatagaagagggaagtggggagaactgagaaactgtgttcagatacaaactcacagaaaaggctttgaaggacacactagggcagttgagctgaccgatctagttggagatcttccaaaaggagtaagcataacttacagaaggacaaggtgataagttcaagcagaaagagctacacaattaataagacccagtacacagtgaaaacccagagctgcttgtgccagacatttaaaatcggcagtatcagagcattaaaccataaatggttaccttctatagctatgcctggcacacccacaaagtcagcaagataatactggaactctctggtattcattcttatcttttaatttcgtcttttttatttctgtaactattctatgtaaaatgtgctttaggacttatatgtaatttaccaatgtttatttaaatactgataaggtacatctaaaattcatagtgaataacaagtgcaatttcacacgtttttctctcatatttcaaatctttaaaaggtagcataaagcagaagggggggtattatggaatagtgttaagtgtagataattaaaggagtatattctatcaaagtattttatatatgtaaatgccatgacaaaacacattactttgcttaattaataaactctaagacaaaataaaaaatgataaggactttaaactctgcttcaaatcccctgatgcagcatttttggctacatgggcctactgtgactgtttttcaactagtggttcaaacccccctttggggatcgaatgaccctttcacagggttcgaataccacatatcctgcataccagatagttacattgtgatccataacaatagcaaaattacagttatgaagcagcaatgaaaatgattttatggttggcaatcacaacttcaagaactgtattaaaggtctcgacatcaggaaggttgtgaaccactgtgctagcatatgagagtgatggaagagaacgtgaaataaagagaagagagatggatagagaaagagagagagaagccatgagacagaacagaaagaacacaagattctgactgtcctacactccagtgatgggagagaaggcaggaggtgacaccagaaactatcaattttcaatcctgaccagtcaatagagacctccctttggaattagagacagggcagatgatgggagtcagaatcttggctatttcttcactgccctgcttgaagtaccacccctagaccatttggctgaacatagcaaacagcgagcaagggccaacgcttatacagggtttccttgctcattctcatattttcattcttcaaggcatcagtctgaatccaggtaacaattgttttcacagcaccatccacaaaacctcttgtgcatctctgactcttaggccacttggtccaaaattgtcattagcccataccatttcatctctgaaaaggccttccccctgctgcctagtcttgaactccggagctcaaatggttctctaacctcagcccccaaagtcactgggactgcagccatgtgacaccacacttgacttactctgtatctttttgaatgtttgttacttattgctgtgacaaaatcaatttaaggaaggaagggtttaatagttcatcgtcatagggaaagcatggtggtggggacatgaaacgacaggccacattgcatcctcagtcaggaaacagaaataaatgaacgctggtactcatcaggttttctcctctcctccctctcattctttctgggatttccaccctggagaacctggtaccaacctcaatgaaatgctacaggtcttccctcctcagctaaactcctgaagcaccctcacaggcacacccagaggtaagtctcctaggtgattctaaatcttgtcaagttgacaggaaagatgaagcatcgcaaccagatataatttaaatgcaaatcataagctacagaagccaatttgacaaggctgtgtgctgtataattccaaccatacagtactctggaaattttcaaaaaagatatcactatggagattgtaaaaagatcaatggttgcccaaatggaaggtgaggatctgaatgagaagaataccgggtttttttaggttaaagaaactactctgataccctaagtagtggatatatgtcatcatgcaaacacctgggatgtacaagaccaagagtgaaccttagcataatgatgcattcatgaagtacagtgaatgtaccactctggtggcagacgttcacaatgggaaaaaattatatatgacagtagcaagaataacatatgacagtaggagaactctctatgctttctgttttgctgtgaacttaaaactgttttaaaataatttcttagatcaagttatatttattatagaaaactatctgtaattccttcctctctccaaaaaaaaaaaaaacctctttaaatattttaactaatcctaagccctcacacatgtgtgtgttccctattttgaagttgggaaatgtgcatattaatatctatttccactaaaatatgacatagttataaattcatggaaaaacattaaccactatgaagccactatgggtggctccccttcctctgcatcctaccatctctgttagaatgatgcatttcccaggctcctttgcagctcaaaggagctgcaggtctaaatggagttctgggagtttggtatatttccatgaaactcagactcaagcagagaccctttcctcccatttgtaaggtagtttggattgactaacaagatcttagggacaaaaaaaatttccctgctacaatgatccagtgcccatgatccagtaccctaggggttgagaaacagatgccattgcccatagaatctaaccccgcctggtatgctggttatggaattgtattcttgcactttggagccctgtgcatggtctcaaaaagattgcaaatggctgctaacatagttcatggataaagcatttgctgatttctggaagcttgtaaaagtccaggaaagcttggtggtgtccttcaatcccagcacttagaagacagaaacagggcatcccaggggcacactagctaactaaactagccagaatcagtcagttccaagatcaacaaaagcccagtctcaaaaaataaagtggagaggtattgaggaaggcaattgctacttctcaagttatcaaccttgaaagaatctaggatcacctgtaaggtggaagtctgggcatgcctacgcaggattgtcttgactggactaattgagatgggaagacctacccaccaaccatgggtagcatcatttccctgggctggaattctgaactgtgtggagaaagcaagctgaaaacaagcatccattactctgtctcttgactgtggattcagtgtagccaactgcctaagtctaccttgacttccccaccatggttactataccttgagctatgcgacaaactaaatgtttttgcctttaagttactttatgacagaacagatgaagaatgtgtatgtacaaacatgcgatgctcctacgcatgtaaagccatacacttgcaaaacaaacataaacacacacacacacacacacacacacacacacacacacacacacacacacacatacaacctgtagatacatgtagaaggaaaaggagggaggaggaagtcatccctagaatgttacttctcagttattctagggaccaacggccctccaagagcctcctttttcagctcacccactaaacttttcctctaaatattttagccaatctatcacttctatatgtaataataactggcatgtcccagtcaattttaaaatttacagttaaataataatacagtccccacctctagctatttatttcaacatagaatcttcccccaagtgattttactggtacacaaatctacattttaaatatttgtctgcttttctgcctactggctgtctgcacacagagagaaacatgttctttcattgcaaaacatccctcctgtactgctctgtgacttccttttatgctgtctttctttcttgaatggtacttgtagatctaacctgttattttgaatagctgcacaatattacatagtatgattgtggcatggcttagtcttacttaagaaccccttgttgacctcactgcacaggtgggtggggtcacaacaatgagcaagtgtgtgatggagagaagagagagaaagagaagtgtagcactttgtgccctatgaagagaagcagaactggagacacaaggtgatgagaattaggcctatgctactgcctgaggccatggtgatttcctgccagtgctgccaccaagggccatgtttgggtccttgccctactgcacatgggggtatgtgttgatatgtgtaacaaccaaaagccatgtagatgtctgtggtctgggctatagcctaaagccttcctcaatacctctcaaattttagcttggtattctttgcaaaatgggtttttttttatttcaaatcgacaacaacattctcagtatgagttattagctgaatcttcacttcattcatcaaaatgaatttccccattccaaaaatacttgaatatggctctgatttcttttggtatatgtgtgttttgctggcagtctgttgttaatacctagccagatgctacgtccatttgatttaaatggttttggatatgttaagttctactaaaaataaattcttcttactatttttcacaaatttattctttgtaactaacttcatatttttattaagataagctggacattttattctaattatatcaaatttatatattaatttactgatagctgacatccttggaaagattggggttttacaatatgaagtctcctttcagaggtatgacatgtccctccagtgtatttctcctgtggccctcacaactttccatcttttccttcaaacggatcttgtggcttcccttttaagtttcttccttaagagtttgccagttttgtagaatatgagaaactaacaggagtttatgggtgcctcccttgaaccaagttctagaaaagttacaacagtgaaagagatgttggagctctgtacacaagagggaaagtacttaaaacaggagctttcagatgccatcctcagaaaggcctgctgggaagtctgaaggcagtttcagaaaacagagagagccctgatggagggaaggtacacagagcagcaagaaggacaggctgggaaactacattctacctgggacccttcctggctccctcatgttgttctgagaagattattaccacacatcacagtggcttgatgaggacatcagtaccaatatgacccttcagctgttgctaactagagtgagtgctgattgcaaagagcatgtagtctcgccagccactgagtgttctcttctccctctttcctttgtctcagtctatggaagaattaatcacaagacaagacattctctgggaagcaaaaattcttgggtcagaggtattacctgggtagggggtcctgatagaacaaaactacttgtttgggcaatgtaagtcctagaaagtgcatgagcctttatgctaacaccagaaactctccactctgggatatattctgttttgatgccaaactcatccaaaggaggaaaagccagaatagaggatcatgtcttctcatcgaggcacatatgacctattgaggttgttggtgatccccccaaagaatgtgtgcttacacagaaaagagagtaccatcctcaggaatacctgcttgcaagtccgaggataagaatactttcagacaccagcagacatctatcttaaccccaaaatttttaacaagaaattgatacacacaatcattcaaatgaaagtactacagaatagaatgaagccaaaaataatctatcagtttttcctgatataagtaaatggaagaataaattagcaggagagacagcttttcttttacagtaaaatatcatcaatagagtagaaggaatggtagaattagaaaatcaccatttgagaaactatcatagtcataattaatacagccaagaatcattgatggatgctaaatctagtgagtgaagttcaacagtcttgaagtatctcctaacaacatattttctacttgcaaagaaaagaatagctttaaatggagcaaaattgatgaaattgctgtagtcaaatcatcaaataatgggacaaatcaaaattgtgtctctcttcataaaatgcagtaagaatacagaatcaattctgtgatatttctgccaaaaatttgtaacctgagtctaatcattagaagacattttataaacccaagtgaggagtgttctgacatacagttgtacctggtacagttgtgcaattggaggaaatgctcacgactggattcctttgtgtgttttttactatcatgtgcctattgactttttttaagttcattttagaatcaaaagaaaaagatgggaataatagaaagaatgaggaaatgtcccagataccaaaggggactcaggagcatgacaactgcctgtggcagacaggtttgagacatttgatgaaattgaaatggattacataatagtcatgtatcaatattaatcttctggtcttggtgttcattgttttaaagagggtttttttcctcatttgtttgttttgcgtgaatcacatactgaagtgttggatgtgataggataccgtaccgacaacttgctcctaagtggttcataaaaaatacttaagtagctgggggaaggtccaggagttaagattgttcactgctcatgtttggttcccagcactcacatcaggaggctcccaactacttattactctagttccaggggatctaacactctcctcttgcctcttatgtcacctgtacatacttggtgcacaaaaactcatataggcccatatgtatacacataaataaaaataaacagatctttagaaaatattttatataaagttttaaagctaatcatgcagattagaaattgatgtaatggtttctttggctgaagaaactgtgtctgggatgcaaatgggaaaatcctgaaatagctggaactgagtcagggttttacaagtgagtttgtttggaaaacaacatggagctacatgctcatgattcatgtatgtattaatgaataagtttacacttcaatataaaaacaaaagaaaccctagtgaaagctaaacaacagtaaatcagtccatcttttatatgcacacaagagtaggaagaaggtcctgtaccatggggaaattcactgtgggagctaggttgatagctgagtcagggaattgcttgtcttacaagcgtgaggacctgagttcaagtctccaggatccatgttaaaagaggagggggagaacggcgaaacccacttgtgttcccaacactgaaaagacagacactgtcagatcccaggggctcattggcctacttggtaaaccccaggctaatatatgaccctgtctcaaaaaaaaaaaaaaaggttgggaaacatagagctttttgtttgtttttgaagacagggtttctttatgtaacagtcttggctatcctagaactcgctctgtagaccaggctggcctcaaactcacagagatctgcctagctctgcctcccgagtgctgggattaaaggcatgtgccaccatgcccaccacatacagctttgtattatggtgactagcagttagaatacttctgtctcagccgggcgttggtattggtctatagctgtctaaccactcctgaagctactaaaacccctgtgctgactatttcatgtgtttttaataacctttttaattttctattcccttcttgatttctttcatgaagggtgaagctgaatcaagcacacattcccttctttctctgaagaacaaactctcacattaatacgagccattgtgtgagcagttatgacctaacaacgccctgctctttaagtatttccccatcctcagtgaggcccaaagtatttctttgctgcttctctgtaattaattcattcatcaaatatttatcgagaacatactatgagcccatgccattctagaaactggggctacagacgggaataatgtctccgttctcacggaatttacagtctagtagaatacgcaaaccataaagaaacaacaataaaattttttcagataacgatatttgcttaggaaacaataacaggtaatgaaaatgactgggaaaggtcctttctatgcaggagagtcagatctgacacagaatgatgacgagccagccagaatccaaagaaagtatgtttgaggcgtggagcagaacaaatgccaaggactgcagtgacaacaaatcaagcaaatttaaagtaactttaatataagttcctggcgactgggaacaggaagctgttgctgtttccatggttttactgcttactccaaacacctaagcctagctcttatcccataccaggcattcagtgtacatttggggagagaaaaataaagatctgaagcagcggaaaggctagactttaaagaggggtggggaaagcagtggtggagggaggggagggtggaaaacgcggggcctcagcagctggtgtttggggatttgtagtaggggaatggaatactttggcagggttcttactaggagactgctcttatttactttgggcccagacattattgatgagtacacaaagcacagccgggttggacatgctcagtgcttgagcctagcttccccacaaaaggtcaatcagccagcaacctgggcctcctggttagagcttccaaagtctttgctcttggaagtggagcagtgatgactgtatccccagttggttcctcctacgctccaccttttctcaaatggaatatcaagtctgtcctcccctcccccgacccccaacccccaccacattacaatatggaactcttctttccaccttcttttcctcacaagtatgaaaaggccaggctcgctctctctctctctctctctctctctctctctctctctctctctctctctctctctctctctctctctctctctctctctctctcttttctttcttgaagggagcaccattactgagaccccaaaagcttcagctacctacacacaggtagcctgctcctctcattccctgcagagccagcctaggcagggcacaacactatgccccctcttctgatggggatgtcttctgtacacgtgtttctcttattggctaatgaataaagcaccgtgtgatcaatggccaatgaggcaggaagataggcgggactaggagaggaggagaattctgggaaagggaggcaggagccaggagagtcacgatgctgctggaggagtaataccatgcggttgttaccagggcaggcgttaccgggtaagccacagcctcgtggcaatgcatagactgatagaaatggattaataattaagatagatctagccaacaagaagcccaagccaccggtcaacagtattataattaatataagtctctgagtgttcatttgggactgaagggcagcagtaactgctgaaccagaatgctcacgtaacgctcttcctttaccatttcctgtcatttttcctgaaaaataaagcttgtcttttaactagactctcccttccctgagtttctggtgttcccctgacaatctgaaagaacggttttcatagatgagagagaacatgtgtcatttgtctttctaggtctgggttgcctcacagtagtatcttttgcctcacagtatagtcttttctagttccatccatttgcctgtaaatttcgcaatttcatctttctttgcagctctaaataagccataatatatatgtaccacattttcattatctattcatcagctgaaagacttttaaactgtgtccatttcctaactattgggaatatagcaggattcgatcgttgcagaaagggaggcagaaagattacaagagccagaggaacaggaagtgtgctatgagattgtgtttcctagaaacataagagaaactacacccatgaaatttcaacaatatggctgcctaaacaagatctgaacaaagacagcaccaatagatgtgttaacacagaaaggggaaacctcatagtgcctcacccctagacaaagaactgtagcaattaaggaatgctgagagctggggtagtctttcccaatagataatctatgaccaagagctcagccttccaatcgtaaacatacaagcagcattacacagactgagcaggctctgtgtgtgtgtgtgtgtgtgtgtgtgtgtgtgtgtgtgtgtgtgtgtgtgtaaacaattaaagaaaaagaggccatgaatttgtaagagcgccagtgggggtccatgggaggggttggagggagaaaagagaataggggagatgatataattatattttgatttcaaaaaactaaaaatgttaaaatgtaaaacaaaaagagttttcatgtgttgatttctgaatctttcttcctcttactggagtcttctggctgactgcaatcatggtgcttcaaggacaagcctatccaatttctccttcatgccttaaggttctgagaacttgtatgaaattttctccatcaccagctgacccatcatttatagagtaaggtgtcttctgtgcatattcattgatggattcctttgcacttctgaccctgacctgggcctttgaaattcacaatcctgagctagctaacagcagtgttactagtatttagctaaatctgaggatacattgcactttggtcctctattacaaagttgcaagccaactgacttcataaacttaatgaagcccaatgatatgtgtttgtaacaaataggtaagcctcggccaatcagagaagccctacctaccttcagtcagtcatgggtggtcaattgtccagtcaaacccaaggaaggcaaatgcagagctgtagctatttcagatgtttctatccctcacttctgttttctgtctccgtgctgtctgctatgttacaggctgccatttccccggaaagctgagaactgcccaacttgcaaattattctttgctcaattaaacattgttaaatttaattgctcttgggtttttctcttagcaatactaaatcagagacaatgtgctttgagcactagctagtgtcaatgaagcaggccctgtgccaccaccttcaaaagacgaggagacctggacaatacagcatctgtgtaacctgctgaaggggacacagaccttaagagacagagctagggaaagcactgagctcccttttttctcttaaggcatactttaagaaactgaacatgggcagacctttattggttcttatttgatcctgaacataagagaatcatctggagaggattggagctaacgctacctttcagttcctgaaagcaacaagccaagggtcaaagaccgaaagcattgaggctttattttgaggtgagcccactccacctcctgaataactttgtatggtttagaaatggaagttcaggagaaggttgctctaacttcaaaagaaaactctcctccctacctatccgtgaactttgcactgcctgcaggaggcgctgttcttacaagtctgaagtcctgctcaagcccagccctggctccttggaggcagagaacttctcagtagggagcatccagtatcaggcaaacaccctcacaaaccctttgtttgtgatgagagacatcccttttgctagcctatgttttgtttcagacacccatccaaccactcagacatctgggagcccagtagctgctgtgaacccagatgcaggatggaacctgagctataaaggatgtcaggttagacctagaagtcatgaatgatctgcccagtaattgtttcaaatgctcccctccctcttcttccttttaaaatggtcctcatcctttgtttggatgggaagtcggtctgtgaggcattcatcctgatttccccttattcactagccaaggaatgaatttcccctcactctataagcagctcctggttttattattggtccatcattgcatgaggaagaaagattccattctggggctggagactggctcagaggttaagactaagtactgttcttacagagggcccaattccatcttcagcatcctcatcaaatggatcacaacagccagattcaggggatccaatcccttctccctgctccagggatactgcactcatatgcaaatgtccatgtgtagacatacacacagtgccacatgatttaaaatttaaaaatctatcttttttaaatacagaaacaagtttgagacagaagtcatcagcattactattagagttcccaagggacagcttcacctcttccctgtttgatgcatgctaaaagctcgattctcaatagggatcacaacaacatcaaccttaggctgtttaaggaaccagtttagacttaaaggaaacatggctgtcctgaaggtttcctcttccacatctgggtttcaagaaagaaacacaatttttttttgaaaaacctgttttttgtggttgttgttgctgttgttttctatacctgtaggaagtagagaatctcagagtcctagggaaaaaggtcacattcctgtgaccaaggctgggggccaatgagtatcagacttgggacagtgtcctagtccaaagggggaatgtggtagtacaaattacttatcacaaatcacttacataagaaaccgataacccagcgtcagcactccgagcatccaatctcagctgccctctgagacccgaccggaacccagagagcaatcccaccaaaatcccacacgctcacataccacctgtaaccacgccttttggtatcagcgcctcagatacctaataagatctctcactacaggggagggttcagcctatgggtgagggaagttttttttctctctccctccctcccttacccctccccacttcttcaaaaggacccaaagcctggtcttttgtggttttcttactgtgttctccccaatctctgagacaacacatcaagagagatgtgaacagtaagatatctgaaaaggtgtacctaggtgactcaagaacaattggcaggaatttctggggatggagggctccattaagaaaattctcttggttggtcctgatgctgaatgatcaacatcagttggaataacctaagtctatcagctagctagctaaggttcatggagaacctaatcttggtcaggtagatagaaagtaggctcaaagagaattcatctttcacactatattttaacaatagtactgtaaagtattaaaatacaaaacctcataagtcaaaaatataaatattttcttcaaaaatgattaatcacaggaaaatttagaaaaccttagacagtaactgtgtgtgtgaaattttcaaccaaattaaggggggaagacttgatgaaagatgagagcagaaaaaaaaattctcaatctaaaaaaggaatttgaaacaactcaaaaaagcattgcagaattttaaacagcattgggaatagtaaggctttcaaaatgcataaagaaaaatccatgatatggaggagaatttgagagaaagtgtatcaaaatatgaggacagagataaaagaaatctgtgtgatgataagtgagatggaaaaacaacagatatttcatacaataaaaaactggccatccaaagaaagacatggaacaaattaaacagaaacaacaacaacaaaaaaaaaaacttcttagagttttgaatcttcaaactaaaaaagattaaagagaagaaagctgattctaatttataatcatcacatcttggtggtggggccaaatgcttgaaaaatatattcccatatttgttagttaatgcaacaaagctaaataaaatgtgccaagtatagctgtaaagataaatgaaaattttggcagcatgatagtcagattgtgcaagtcttttagaaaaaaaaaaaagttggttcatttgctctaagaacctacatgccatggctctgactttgtttgagcatggcaatcacttggagagcttttaaatcctggatgttttgtttttaattccagaaatattttatttaattgacctagtgtatgacccagtgattctaaggtacagccctgtacaagactctcttttcggcatggttgtgctagtggaaatagagggaggtgtacagaacctgcacttgtaagaggtatgtgtgtgaactaaagtgacaatgctaagatgaattttgacccccagcaggcacccagacccatgataactgtgataacacacagcttgttcttaggaaacactacatcgcacttcagctcaggactttaggactgaacaccttatggacacatacctggttgatcttatctagcaacagcactaagttccatgcaatgattagctttaattgtctccttgacacaacctagaatcacaaggaagaaagcgagtctcagagaggggttgtctacattaggttaaactatgaccatgtctgtgggggttgttttacttaatttatgtgggaagatccagctcgatgtaggaggcaccattccctagacaacgggtcctaaactgtacaagagaagagaaatctagcagagtacaggcaagcatggaaactaacatgtgtgcatttgtttccctgctcttgactgtaaactgctgttgtgaggtgaaatgaacccctttgtcacctaagttccttttttgttaggatactttaccgaagcagcagaaataaaactagaagaccctatatattcccatccccagcatctcccatcaaaatccgattttcattaaagaccctaccagaactactgggactgcagcctctaccccaggatggtacctatctctgttcccatgagtgcctcttctccagtttccctttaccacaggatttctgcccacccagaattctgtaacccctgacctagacacgaagttggcacaaagggacaacagcacaggagaagactcaggaggcttcatccacaggcagggtgcatggtgaaaaggtgtttctccatgccccaggaatgaatgaagaagctgtagccatttgtccgtgaggctcactgtgaaagcctcaagtggctttcagcaccatctccaaagtcacaatggaatcctctaacttcaagaaactcaaaggtcttttttctttctttctttctttcttcacaacagcagcatggaaatcagaaagagaaataccggtcagttaaaccttttaggttgcaaagctctgacttctcaccttgtctagggatgttggatttaaaaaccacagactagtgaacttcccagaccacagctcctcctccatgttgaccttttaccctaactcaagtggcacggtcacaagcccagaacagggtctcagctacctaaggcaggggctggattcctgactgaggaaaaccaaaaacattgaaagacacagacatcccatgttctttctgctgccccaccacgaccctaatcttaatgtgtacgtaatttggattatcctcctggaaaaaatgtacaggagatatatatcctggatttgaacatctgtaatccttctgtctcaggtgcctctaccttgaccttaaatgtgccatagtcaggatgtttcggctggtaaatgattttccaaaattgcccccttggagccatgaatcaaagctctaagagcaaagagagtaagataaatcacaaaatgagagatcgatatgggttatttattagcgactccacagtaccggctggttctcccgaagctgtgtgtggcgttgcctggtaaattaggacagtcacatcctgggaaatgacgtaaaatatggcagggaggagactgttcacaaaggaaaccatttagcattgcttagtgtaatgaaaaattagaaaattgggcacatttaagaaaactgtatacatctgcacccactaaacaaaatggatagccatttaaaatgttagttgtgaactttatgttacaacatggcaaatgtttataattagaaaagagaaagaaacataagattagtctacatgctacatttaaaagaagtaagggttttaggggaaaggctgtaatgccagcggataatgtgctcttacttcagtagtggaattaggtatgatttttttctacaacatttccataatgtgttttagtgctcctaaattgtgtgtgtgtgtgagagagagagtgtgtgtgtgtgtgtgtgtgtgtgtgtgtgtgtgtgtgtgagagagagagtgtgtgtgtgtgtgtgtgtgagtgtgtctgtgtgtgtgtctgtgtgtgtgtgagtgtgtctgtgtgggagtgtgtgtgggagtgtgtgtgtgtgagtgagtgagagagagagagagtgtgtgtgtgtgtgagtgtgtgtgagagagagtgtgtctgtgtgtgtatgtgtgtgagagagtgtgtctgtgtgtgtgagagtgggtgtgggtgtctgtgtgggtgtgtgagagtgtgtctgtgtgtgtgtgagagtgtgggggtgtgagagtgtgtgtgtatatgtgtgtgagtgtgggggtgtgagagagtgtgtctgtgtgtgtatgtgtgtgtgtgagagactgtgtctgtgtgtgtgagtgtgggtgtgggtgtgggtttctgtgtgggtgtgtgagtgtgtctctgtgtgtgtgtgtgagagagagagagagagaaagagagagagtgtgtgtgtgtgtgcgtgcgtgtgtgcgtgcgtgcgtgcgtgcgtgcatgcgtgcgtgcctgtgtgtgtgtgtgtgtgtgtgtgtgtgtgtgtgtgtgtgtgtaattaagaagctaggaaagggggaatgtagactagcagtccttgaagctccagaaactagtttcattttatgaataagatacccattctggatggctatttggctttacgccaataagatcaagttaaccagagtgtaacatcagtgagacggtatccttaagatacaggcttaaatacaaaacatttcaaaatatgtaaatttcattgtaaagccttgtgagtttatgtacaaaggaatcgagcttatttattatggtctcatcctgagttttctcactgatgttcagtgaggaagtgataatacagtttatttctccattgactggaaagaaaacacacatgttgattaaccataccacaaaaaaaaagactttatgcttcatacctcatgctatgagtgatatgcttatacaatggtttgcttttaatgatgtacagttaaattttctttcaaactgtcctttctcaaggacttcttgcaccagattttcaaaggacgtgtgactagcttgatgtaattgcttctaaacttcagttctctcatgctagtcacttgtccaataaaagagataacattgtctaaacagaaaaataattttatggtgaaaatacttagacaaaaaaaaaaaaacaagatgttttcccagtgtggacattgcctttttattaacatctgggctctgcgaatgagttcatagtatacaacctccaacactttgagtgggtgctgggaatattattgattttatggagtccactacattgtgagaactacttccaaaatggatatgctgaaagcagtctttaaatgaaggggagtgagaaagagtccccgtgaaccagtttacaatccctgctggttccagcagttgctgacacagctctctaactattcccatcatttccccgagcactgggctcaataaatcaggctccaatgtgacctgacccttccctcaggcaggttggtgggaaccccctctctctctgtggagcctgtgatgattcataaaaatagataaggatctgagctttcctagacatcttggcatgttggattctccctggtttaaagcccctgtagatcagaacaacagccccaaatttcagcaatctgaataacagtcttcagaaagagaaaaacactgtgagccaaggcagaatgcttgtcaacacagtatagctttattaaataaatgatgtaagaaacaaagggctgtcagtttgttgtgtcctagagcagccatgaccctgaaatctttttcaagttaccactcagtctagtatacgggtatacccatcctccatggcggaagacttgcctacacagtgtaatcatttaagcaattttgtaagcactcatctctgggtgtcatcaccagagactccaatgtcatgatatagggtgaagccatgggtgctaggcttttaaaagttccctaggtaactctaattagcatctagagttgagatctattggtgtgaaggaatcttctcacggttccatgcctgtagagaatacttcctaggtaagggattatctaagacattcatacatacatatgaagtaggggttctaggttggagaagaatttgacagtgtaccacaagcatagtcagcctaatattctcttaatattgaggctgtataaataagaacaatatatgtgatggggggtatagctcaattggtggagtgcttgcctcacccaaggtcttaagtttgacttccaacaccatataaggcatggtaccacacatctgtaatcccagaagttaggaggtaaagataagagaatcagaagttaaagatcatgcttggctacactgtgagattgaggcctgggatacaaaataccctgtctcaagaaaaaaattaaagtctgggcactctctaaaggaagacatacatatcgctatttgttggtgtgtagtgcggtgataaggcacaagtccacggggataagtaaaatgataaggcataagtggctagaggctacatggtctccattcaaagaccacctctaagaaagttaattaacctcttcagaccttgatttctttacatataaaacaaaaagtaactgtttatggtagcacatgcctttaagtcagaactcggaagacaaaagcaggaagacatgtgagtttaaggccatcctaatctatatagtgagttccaagtctactaagtgagacctcaaaaaaaaaaaagtaagtactctggttcctacaatccactgtgagactacaactcacagaatcaactaagaaagactcacaggggctcacagagactgaagcaagcatcagggagcctgcatgggtctgacctaggcgttctgcataaatgttatggctgtgtagctgggtgtttttgtgggactcctaacagtgggagttggggcgtctctgactcttttacctgctcttgagatccttttcctcctactgggttgtctccgtgagtcttgatatgagggtttgtgtctggtcttattgtaacttgttatgctgtgttcggttgatatccctgggaggcctactcttttctgaagagaaatagaggagcagtgaatctgaaggactgagagggtgggagccatggagagaggggaaactaaggtcggaatgaaatatgagaaaagaataaatataaaaaacttaaaagtaagtactctaaaatgattctttatagaactgtcaaataagtgcatttaaaggacttattgtccagtatatgataaaagctcagatcagaataaggtgcttttagcttctctgaaatatctgggagctgagcttacagaaaactacctgatcatctagctcttaaaatctttctaccatctttctacatctcatcatcattgcttcccaaacaagacctgaacaaggacaacaccaatagatatgacaacatggaaggggaaattttatggggcttcagccctagacaaagaactacagtcaactaaggaattctgagagcagggttgtggggtgggaggaaatggtgttccccaggaaagagcacaccagttggttgtccaataccaagtagtcagccccttaaaacatacatacaagtaattttatacagactgagaagttatatatttaagaatacattgtgtgtgtgagacagagagggagagagagagagagagagagagagagagagaatatcaacaattaaagaaatagaacatttcagaacgagaaagggggtgcatggaagaggttggaaggggaaagaggggaattgatgtaattatatgtaatttcaaaaataaaattttttgaaaactaataaagtatttttaaatatcatgagggatctgccttgtgatgaaacagttggcaccctaagaaccttgatcacagcatcaccaatatcactcagaatcgaccattatggaagattgatattatccatttacaaaaatatgaaaatgatggcaccaacattgccaaaccaaagtcatcctcagcagatagcattttattagattacatctaacaacttcatataggatgacaattcaccaggtacctctgaatacattttctaaaatgattacatcaaagtatctaccaataaggtaaattgcttaaatgtatgcactatagaaataatttattaagatttttaagccacactgaatgcaaatgctacctgtaaaatttccctggataaaaccatcagggccagaggctctccactagactgtgtgtagcaagatacccataattgaattctgaagaacatattagctcatcccacatccctggggagttgggcctgacttctataattaagacatatctcctggttagattcgttaactagaaaagagtatcaaccctctctcctacttagctgagtgtcaggatgcatgcatctgccctaattggacaatggagaattatctgcactcacatttttgcctaagaatgtatttccttaactcttgtgcttctaaatggttatcaaaggtcaattagggaaatcgatattcataaataatttcttcaaagacactctgttcgttctcctaatggttcgaactgaattcttagaaaatcaaaaaccccacttgctgctaacctagacaaatccaagcagcagtattttgggggtgtacaatgtttatgcatatagtacaaaacctactgatactaataaagagtgacttttataagagattactatgtgtgtaatcgtatctggcttttacaatgaccctttaagtggattaaattatttcttccaatttgtaggcaaaaaaaataataaactgagtcatagaggtcacatattggtaagttacaaaaccaggacatggatctgatcctagaactccagtctaccatatgctttactaaaatgatttaatgatccccttctcaaaccctggataaggaaagccatgtagaataacttcatcattcactcacttctgaaagaccatggtaaaggatgtctgggggcagggggggtctgtttcttttaagtagccaaacagactgaagcaaacatatcccatcattggacctgactacagaatcataaatctcaatgaactttagatttttgttctcaaactggaattctaaaagtgaaagtgtcagaaccccacacctgaaccccatgagtgaccagttatctccaaagcaggctgttcatctcaaagggactggtcacaagagatgtcagcagcagaggtggcatggcatggatattatcctgtagggaagtgacagtcagcctgaacttcagactattgattccggagggttgataatgaagttagtcatgaaatcgccccaattcatccaaaccaaaggtagctttattgacccatgggtttgggaagttcagacataaattttattctagaaaaggtcagactctgagccccgtgtagtcagtgttccatcactctaggttgcctaaacaagacctgcataatgacaacactagttaacatgcaacatggacagaagaaattcacaaagccccacccctatatgaatagctataggcaaccagtggctgctgagaaaaggagagtcagttttcttcaggggtgtgccacctgataggttatccatgtcccaagtggccaaccctcaacaatgtacaagcaacactaaatggaaccagtaggatggatggatggatagatggatggatgatagacagatagatagatacatacatacatgcatacatacatgatagatacatagacagatacatcataaatacatatatacatagatgatagatattgtatgtatataatgtatgtgtatgcatataaaactaataaataagaggtcaagacacaggaagatttggagagggagggatagaaatgaggtaaatacaacattcatatataaaattttaaaaacaaaaaaaattacaaattacactcttctttctgtgtgctttctcatctatgtgagggtgatggattatccaaaattctttcaattaaaaaatatatgtaaaaaagctagacagtggtggcacgggcccttaatcccagcactcaggaggcagaggcaggggatctcagtgagtttgaggacagcttggtctacagatagagttccaggacagccaggggtgttacacagacacaccctatcttgaaatatatatatatatatatatatatatatatatatatatatatttcatatatatatttcaagtacatatacatattcaagtacaatatatatatattacatgtacatatagtatatgtataaataaaaacatgtgtaattcagattctctttgatgaagattcctagtatgacgcacatgctgccaagccatatactcaaattccatgctctgatggagaaaggcagagcagggaagtgaaagaccatatttacagaatagaactacagcatatgttggggttaaaaggtctataaccagagacaaggaagagaatgtaatcccaggaggtgtcccagggctcacaacagtaggtcagggccacagctggggcttgataaacacgtcaccctgtgcattatacttcagttcctgccagttcaaaacactggggctgagtgtcccaccaacataaactgtgtttatctgttctggagatagcacaatgtcccacatgttcacatctccaatgtctcccaccaaagactgctttgcatcaaaaccaccaccatatgagtcctgctcctgccccaggatgatgcttgcatctgtccccacagtgtagcccttctgcagaattctccgcaccttgggtttcccatcaatccataactctgaaatccctgtagcagactcccagatggcacagatgtgtgttggagcttcaggaatttctgaagccttgaatagtacttcaggcccacccactccaacagtataccctctatccttagaccaaaatatgaggatgtcattagggtttttcttggtagcataagagaaaatactgaagccacgggttgtgctcagttctgtgtagatgtggagacacacagtgaaggctttcagtggcttctttgtctgtgcttccagggacacataggaattgtcggactctttgggaaatacgaaggccattttagacatatctgtgagacagaaaaccaagaaagtgagtagtttctcagataacaaagattcatccctcacgagtagagtttgggatcaagagacatgtgacctttcctaggttacacaaatatgcatctatacccgatgctgtttcttgaattccatatgtaagatattaggctctcatccatcccccccatcagatctttataatagatcctacctttctgggcaaaagtctgagagaggctgatcaggaccagtgagcaccacaggagcttctccatggctgttgaagctgctggacctggatttccccactaagaagacacagttttttctgaaaaatcaacgatgagaggtcctggatctctttcctcagtcccagcccaacgttggatttataactatagcagaaggagaggctgtaccactttgtaaatgatttcctaacactgtctcttggggcaaacgtcagaccactgggaggaagggaagccaaaatcattctggaacagagaaatcaatgtaggttatttattacaaactcctgtgaccactgaatcaccagtttctttgagacaggaaaaatgaggaagcttcccaaggctccactttgcctatctaggctaagaaaataatgggaaatcttcatttaatagacaagcactcgtgtgtgtgcacacgatgctctcatctccagcatctgctaagcacttccggaagctgttctcttacactttggaaaatgaagaaaatgagcattccattcccagcaccaagaacaaatctttcttggccaacagcgtagacttatcagagacctttgacagaacgcaatgcatgccctagcccaaatgtaccactatgttcaatttcatgaaacactgttgtttgtttgtttatgtggaagcttcatagaagagtcaggatgattggttgtttgcttcttttgttaagaaatctcattggccctccacatagcttcactatagttgagcagttctatagctctgtacttaactcagtcttgtagttgaatgctgtgtcccttcaccttgctcctgaaccccttacaatcttatccattctctcattccattcatgagtcaccctctaattaagaaattggagaagaaatactgtatcccctgaagcagaaaaccattcattcagtaagaataccagtcttagtttggtgcattcccatcttaccaaacactagatttctcagtcttagctacaggccagaatgagggctggacaggatagggacaatctctacattgtgccctttaaagtgaacatatatggcttccctttcacttcttccttcccctctggctagcattcatccacgctgataggagataaagcagtcacctttgtctgacaaagggcaagctgcatgttgaggttggcacagcaacaagatagactgaacctttaatttttattatgaagccatagtatcagcccttgactatcaacctgaatatttgcttaacgaatatgcagtcttacactctgttaaatcactatgaatttggtctttttcatattgaaacttggttgacaccactttatatttttacactgtaaaatctaccagccttcctgcctcccctataagaaataaacaatttctctatatatcttaggtcaaccttgcacctttgccacaggtccagatggtccatcacctaatgaactttgctcccatgtgcttctttctgcattatgacacatcattaattttgtcatcactccctcaaataccaacactataataaacataacattttagagaaagaaggtaaagaaaaagggaaaaggaaggaaaataggaaactacaatctccattgttccatctattcttccttaaccccaggatttcaggttcttatctccatcacttgagaggaaaataacataaacatctctctctctctctctctctctctctctctctctgtctgtctgtctgtctctgtctctctctctctctctctctctctctctctctctctcacacacacacacacacacacatacacacacacattaaatttaataacattttctgggttttatcttatgcaacagctgacaacattcaacacagttcctaactcttccttgaatacatgcacatcacttttaaagtgaacaaatttgaaagccttaagaagtgatttttggctccaccaccccaagtttgactcccagttattgctaagagacagacagagcctcaatcacattgagacgttgaattcatctgttgccagtgcccttactggactctgatcttcaaaagtgggtcatccacaaagcccctcttcttcatttacacatttcagttggtttatgatacttacatctcaaagagcttgggaaaatagaaatacctttgtagcaaaaccctggacccaagaccttgatttcaaattgatcatcacttgccgtgaaacatcctggtagccttacataggaaatctgccagaaaaggatttaaactgagccacaaaaacagaagggagagactcaaggctgtcttactttcctttcctgtttttatgatttcaaagataccctgacaaaagcaacttgggggagaaaggatttattctagttcacaattccaagttacagtctatcatgagaggaaaataacagaggttggggtttgagggagttggtcatatcacatccataatcaggaacagaataatggatgcatgcatgcttgttctcagatcatgttctccactctcacactgtgcagtatcccctgcctagagaatctgcctcccacggtgggcaatcttcccacctcggttaaggtaatcaaatccccatagaccaacctaatctagatagtcctttactgagactttcttcccaagtgactctagagtgtattaagttgacaattaaaactaaccattatagagaccaaaagaataatataagtcttggtcatcaacatctaaattttattttctactacatcatacacaaacttcaaaatatttttgaacccctttaaccataattgttagttttagtgaatcaatgtctttacagtccaaaattttattgatttgcaagtcaaagttctatagattgtaccaattcattttttactcattctagccaatttaagtcattaatatagcatttacttcatattccttacttcctagtcaccattagaattatgattctattttaccagaaaaattattgcatttgtacccatgattattattatactattttcactacttatataaagtgcttaataaaataatctataaaaacattgctactaaggtcattttactttaagcaaatgagagactttgaaggtttataaataaggaaatgatatactcagataagtgctttacagtttttaatgaaagaactataagggttgcagtcaagtaagagagattataaattcatagacttaatggaccttagatcatcagttttaccatgacaaatattagaaattgctgctaaagatcagggactaattcattagccagactagttatggcaaatgtgacaggagttggaccagtaccactgatgagaatggaaatctgaccaaatatggagtcatcggagagcagcatcagaagacacttagctagcactttgatatcaagcattatgtgagcgaggccaaaacagcatattgactcacacctagatcagtgggttccacttatttggtgattagtatctaacccaagctaagtctccaaggttaaaaaatgcacatagactgatacaaataagaaagagtaagtctattatgaaaaaatgagaaaaaaaacatacccttttatttatgggtaatagctctgccttctggaaagacaactgataccaaaattggcccagatttggcgctcagttgcattgttgagtggataaatgaaggcacagcgggaagaagaagtcacagaaggcagatttaagccaataccatcttcccacttcagttcctacaaatgacaaaaaacgtatttctaaaaatcagtcaatatggtacagggctgggggagaagagtttcgttggcaaaaacaaaaacaagttctctgaaatccaaaaagcaggaagcatgcatcagtagaatgtatcataacccaaaacatatgcagggaatgtttactgtgaaaatgtgttggtgtaccccaaaatgaaagataatggaaatgagcggtagacaactaggcagcagtattgatcagggctcttgggccatacctcactccctttcccagagtcctttgttgacagcctggagcaggaagaatcctttagcccaacaagtaggatattgccccaagagtttgtagatatccagaaggttcccaactctgatgataaattactgatatgccctgacagtatttcctgctcatttctcatagttcctagagataggtcacagaaacagtaagagcacccacaggcaaactagaaggcttaatgctatagagagcacctcacttaaaatatatagatatacctactttagaaatttcagagacaatggtaaaatctggtaatggtgatggatgccagtaatccctgcaattaggaaatagaggcaggaagatcaattattcaaagtcatcctctactacattgcaagttcaaggctagcctaagctatatgagacttccctccaaaaacaagagtaaagaagaaatgtataattaagatattctggttatataaagcatgaacaagcgaatagcaaacttttttaaattttacatttttttctttttcaaatttcttttttcatcatcttttatttatcttacataccaaccacattttcccctccctcctattctcctgccccctctcccccactgtcccgttgccctccccccacccccatccactcctccttcatcttcacttagatgggataaggcttcccatgggaatcaacaaagcatggcacatgaagctgaggcaggaccaagtttctgcccccctttatcaaggctgaacaagatatcccaccataaggaaaaggttccaaagagccagctcattacatcaggaacaggttctggtcccattgcttggggacccacaaaagaccaagctacacaattgtcacctagatacagaggacctaggctggtcccatgctggctccctagctgtcttcccagagtccataaattccataagctcaggttggctgtctcttttgggtttccccatcactgatcttggcgcccccccccatcttgtctatacaatccctccatcctctcttcaactggactcctggagctcggcccagtgcttggctgtggatctttgcatctgctttcatcaggtacgggatgaaggctctatgataacaagtaggtcagtcaccagttgcgcaataggcactctctaccattgccaggagtcgtggttggggtcatccttgtggattcccagtaccgtccctggcaacaggtttctccctaacctcacaatggtcccctctgtcaagatatctccttcatcacccttctgctccatcctgctcacaactcaaccatcctgatcccgcatcttctcatccctcatcccctcccctctgttccccctgtcaccagtttacccagaacatcccatcctctccctcttctcagggagatccgtgtgaccttttaagggttgtccttgtcacctagcttctctagggctgaggattgtattctggttatcctttgaataatatctaatatccacttatgagtgagcacataccatgtttgtctttctgggtctgggttacctcactcaggatgatttttttctaggttcatccatttgcctgcaatttcatgatgtcattgggggttttctcctgctgattaatactccactgtgtagatatagcacattttctctatccattttttaatttaggggcatctaggttgtttccatgttctggctattatgaataatgctgctatgaacatagttgagcaagtgtccttggggtatggttgtgcattctttgggtatatgccaaagagtggtatcactagatcttaaggtaaattgattcccaattttctgagaaagtgccatactgatttccaaagtggctatataagtttgcactcccacctgcagtggaagagtgttccccttactccacattctttccaacataggttgtcattaacatttttttttatcttggcaattctgcaggtataagatggcatctcagagtcattttgatttgcatttccctgataacggaggacactgaacacttttttaagtgtatctcagccattcgagattcttctgttgagaattctctgtttaaaactgtaccccatttttaatgggattatttgttgttttaatacttttcagtttcaggaggtcccatttattaattgtcaatcacagtgactgtgctaccgtgttatattcaggaagtagtatcctgtgccaatgcattcaagactatttcccactttctcttctatcagtttcagtgtaactggatttatgttgaggtctttgatccacttggacttgaggtataggtgagtgactatttgtatatgtaccacatgcatgcctggtacccgggaaggtcagaagagggcatctctgaaactggagttacagacagttatgagctgccatatagatgttggaaattgaacacgggtcctctgcaagagcaaccagtgctctcaactcacaagccatctctccagttcccaagaagttattattttgaagaaaaatatttagaggtaaagaaataatcaaagtattaatagaaaaatgtatggataatgaaagtgaacagatcaaaaggacctaggaaagatgtatagacaagatccatgtctaatccatgctaatcaggacaaggagtaaaattagaaagatctccaatgtgtatatttgtatcctagaaataaaaagaatcaatgtgagttccataaagaataataagtattgggagtaatagatttatgattatcctggtttggtcattctatcacgtgtgcatctaaaaatctctttgaaccctaaaacatatgcaaccattctttgtcaattaaaaataaggtaaaatgtggcttatcaatggatgtttgaaaattgtcaagaaaaattaaaatgagaagagatacggttatctgacttactttaagaatatcacgttacttcagaatccaaataaaaagaataccagagaatgagaagtctatcttacctacaaatcttatatatgcaaaagaaattcaaataaaatctaaccgaactacataggaaaaaaatcagacatcacagctaagtgggattggcaacaaacaaaagcaaaggccctgcaaaaccaacacatcaggtttgttcagtatttgctgggaacactcagaggaggaacagtgggagggatctaggattgaacacggggctctgagaaaagaattcctgctttacagctatgagtctgtgtctttgttagggtttctcttgctgtgaagagacaccatgaccacagcaactcttccaaacgaaaacatttaattgaggtggcagtttatagtttccaaggttcagttcattatcatcatgacagggagcatggcagcttgaaggcaggcatggtgctagctacagtcttgatcagaaggcaacagaaaatgaacggtaacactgagcaaagcttaagcatagaaaatctcaaagcccacgcctagtgacacacttcctccaacaaggccatatctactctgacaaagccacacctactaatagagacaatccctgtgagattatgggagacaattacattcaaactaccacagcctgcaaggttggagaagtaaatatctttttcccctgtatgtccgaggagtccatgcacaatagcagtatggtataacaactcagcatccatggcagcagttctctggtagagtgagaaggtgaagtccaggctttgcagttagagctaaacaactcgcaaacttgagcaggataagggacataagcttccatagcaagagtgaaactagccatcccctgacgtgactgagggtagacatccatgccatgcaattagacaggaattgattgacaagaatgcttcccatgggtttctgcagtgggtcagaatctttttttggtagccagctacagggagttatgttagacaagtaaaatgattagcatttacctgtcaaaggttctcctcagaaaatcagagaaacctaccaatgtaatttataccatcttgatccacttaaacagcaacatcaaaacatcattcaaagggatcattttaaaatcatgtttaaaatttcacctccatccatccttatcaaattaaaaataaaagtttcaactaaaaatatacaaaaaaaatatattcttaaaacttggggctggggagatggctcaatgagtaagaatggttgccaggcgagcataagggcctgagtttgactctctatcacccgtgttaacaacatagggtgtggccctgcacacatgtgatctcatcactagggacaaacacaggcgaatccttgcagctctctggccagtctctagtgaaaacacagccagcctcaggtcctcaagagaataaagcagagagagagaaaggagaatacccaacatcttcctctgaccttggcatgctacacacatgcacacacacacacacacacacacacacacacacacacacacacacaccactccactctacaccacacatatacaatggtgggtgggtgccattatgatgagccaatatatggagagaaagagaagcaaagtagtttgtgtgctgtggaaagaggcagcactgaagaagtaaagatggtgaggaacaggctgatatgggtggcctgcttgccaccgggggccaaggcaatatccaggcctgggctgctcccaggccacgtctgggtccgaggtcctgccacagctgaggtctgtgttgatatccgtggcttcaataaccactgaaggtcattcagatgccaggggtctggtcaaccacctgagtccatgttggtatccaagagtcaagctgctgccagggccatgccaatctgagtggcctgcactgccactaccacgtgaagccatggtggcaactaggccctagttgctgctaaggaccttgtttgggtctttggttctatagcagccagggtccgtgttgatatttgtggcttgtgtggccattgaagaccatgcagatgtccagggtctaggtcacagcttgcagccatgttgttgtccaagggtcatgctgacaggatgtcctccaggcctgcctgcagctgagggctatgcctgggtctgtggccctaccgcaagtgcatgctgtgttgatgtctatggcatctgtcaccacatggatacctggggtctatgctgtaaccagtgatcatgttggtcttcaaagaccatgctgctgttagggccatgccaatctaagtgatctgtactgccaacaggggccatagtgtcatccaagaccttgctgctgctgagggccatgtctgggtccgtagctctaaagtagccaacgtctaccttgatatccatggctcctgttatcactgagggatgtgcagatgcccagggtctggtcagccacatgaggccatgttagtgcccaagggccatgctgccactagggtcatactgatctgggtggcctgcactgccactgggatgtctaggcctgagctcctgcctaggggccatgtctgctactgcagctggagtctgtactgatgtccatggtccatgttaccacagggggtcataggaactgtgcatgttgaaatttgagggctgtgttgagccggccctgcccttcactggctctaggatagctggccctgccccttactggacaccacagcaggagagctggccccacccttcatcacaggtgtgggagagctggctccccccctcacctgagggggttggtcccagcagcccagactgaccagctcggctatcacccagaactacacactgggccttaggttggcccaccctcacacctaccacatctctgacctgctggagagcatgaatgattggttctgtggaaccatagctacaggaactgcgtgacttgcaggaacttgcaacagcaagatatctgagaggtatttccgtgagggtccagtgatgatgttgtgccaagggccttgaaccagaccaatgactccttgtaatgaacacttgtgggtggggctaattagacaaaagggtatactgtgtggcacactgcagctccagacgccactgagatgaataaagaggtgttggagagtcaagaaagatggaggagtaaggttggggtttttgttttgtttttaattaattttgtgggggttttctgcaggggtgaggggtggatatggagggatgaaaaggtgagtaggattggtgtacatggtgtgaaattcccaaagaatcaataaagaattacattattaaaaatcccagacatatctatatacaacttttagcattagttggagtttgatatttgtattgatgtaaaataaccataaaacacatttaaaatattcttttcccctagaagtaatcagttaggatatataacatataagatgccatccacggtattactaaaacctaaagagcacctagaagagggtcaaacagaaaatggacaacatttttacctaaagcattaaacagtaaaggacatgaaaattaataaatggagctgtgaccacatccactgaatggcctaatatgatagtgttactactccccaaattgatgcatacgttgcattaaagatgcccatatcctacagtccaaaagtcttacttctatcaacataacctctgggaaactccttcaatgacatgtccaggaaaattctttgcagcactgtttgttattggggggggatgaaggaatccaagtttccatctgagaaatgctgtttttctatgacagaattgtttacctcggttaaaaggcatgaagaagaaatgtacacatcctgttctgccacaaatcaagtgtctggatgcaaattaggttgtccctcatttcaatatgtaaattgaagctttacataaattaagactagtgtcaatataacatagaggttatattcattcgtatgtcatcttccccagcaggttaatggtgaagcaataaagaccacattttctcacaagcaaagaaaaattctttgtaaagtgtgaagctcttaatgaagatgctgagaattctgtctcagcacggttagttcacacacgcaggagatggtttatagtaccttcaaacattgctatgcattccacagtattaaactatattgtggtgctgcgagtgctgatgaagacactgccaagaatatctatggaacacagaattttattttattgatgactggagaagctacactcaaaatgagaatttaagtttccatgtgtccagcccctgttgaaaatgatagccctcaaagaaatgtatctcaaaggtcatggggcctctggactgaaggctctaagagtggaactaattgtgaggctggcggaagtgtctgaggtttcgctgggctaatgatgtcatcggattgttactgttcatgttagtcctcttggtatgttactgcataggtttggaatggtctgcctctaattatctatgggcctaattatctcacaatccctgttatttttagttcacaaatcatgcagaatgtgaagattttttcacgaatgcatatgttgaacaatagctaaagaaatgtgttttttaaaaggcagagctcaaaaacaatttctaagataaaaagcaagtactcgaaaggctgctaaaatggtatctcatacttttaaaattccaaacattattatgtagcatatgtaaatatatttatctgttgtgttttttaagtattaaaaacaatgaataattcatctcaaacacccatagcatcagtctgcaaaggagaagaatatcagaaaaaatccaaattgagtgactttctataaaaatatccagccagaacttctcaatattgtcaaggtcatgaaaaacaggcaaagaatgagattctgtcacaggccaaaggagactataaagacacaatgactaaatgcactgtagtgtcctgggttgaatccttaaacaggaaatgaacattgatataaaacctgcagagatccaagaagagcctggagtttagtcactagcaacccaccaacgctgttttgtagttttgacaaatgtaccatgaccacatgaggtgttaatattggatgaagggcataggggaactctttgtattgtgttttcaacatatctataaatccataaaggcattcccaaaaatattaagaaaagatggtacaccacacctcccaaaaaaatcacttatgtaagaaaggcagtgaaatttcattatcctgcttgtatatagaacaggagataaaactttctttgaattatatgagcattgttttaaaatatacctatgtatatgttctacaaatttataattcttgataacaacatttctcaaaataacaaataaagttttaaaaagcagtattattttaagatagtgttagaatactctaagttcatatgacttcccagatactcaaaaggggaagcatggacgctggggtttgtaaggtcttccagaacacattctccttgtcctttgagttttgaaagaaaagtcagaaccatgcagtccaaaatattgattttaaagctgaaagagactgggttggtaaaaatggcttagcaccaatccccagatacagacagacttaatcatccaccccaggtcatacagaactagacaggtgccatgtcacaggtgcagaatatttactgccaaggtcatcaaatgaccaagagcagatccaaacatatgctatcggcagtctagaacaagatccttaacacacacacacacacacacacacacacacacacacacacacacacctcaaaaagagaaagagaaaaggggacactgagtttttatcataaagccatcaataggatgtcactctttcaagtggcctgcagaccactctccagtacaaaagccatgatgtttttgtgtttgctgttttctatgctgtacatattcccactgaagcagatcttaagctacttgtgttgtaccacagttaagaagtggccaccctggaaggagcaattcatgtagccatgccaggaacctctctttcacttggacttgtcccataaagtaatagggtgtaaaattttcacctgacacagctctactctttgttctctttatctatcattcctgaccaataatcctacaatcactaaataaatgggtatcagtaatataccttgataaataaattttccaacaacagatatgacaatgatatggttacaactgtcacactgcccatcattcaggctgatcaagcatcttcttctctcattggcccttgtatgttcctcctgaagctgagctgctctccatcaaaaaaaaagatggccttctccaacagagaggaccattcttcattcaagggtctacaagtagctgaacttttctgtcagatactccaaactctcaaggtctacaaatcctccagatatgttgaaaatcaatgcagagattgtcccaatagatcaattaactgtaagactatgccacaactaatctaaaattcactccctagtctgttctcaatccaaattcacctgagttatattccccaatgtagccccatcaaagttctgcattgaaattgaacaatatcaataaccaatgtggacaacatatagatgtccaactctaacttttcattattgtatttctaaaatgagattaactccaagtattaaactcccttgtaagtaaaatgcaaatgaattaaagtcagatgtccttgcccttatgagttaaaaagaaattgttttagactatgaattcattccctttacttctaactctacttgtctcaaccagggaattgtagtgcattgccatggaaaagccaaatcacagcatccacaacttggacttttcacaaaggaaggtgtggttccttcaagcctaatggggttgaataagccctgcctttaaagagtcccaaaaacttaatggaacacattaagattgtcccagcatccattccacacctacaaaatatagagagagcaagctaatatcacagctactgaatgaattctttcagacaaaaatcatctctccaaaacccagaattccatgttgctgcaggcaataatagaaactccacagtgtctgagagaatgagaacacttgaagaaaatcatgggtttgtctttgcaagataccggtgaactgatattagccatcctgggtttatactctcatctgggggaaatctcttgggagattaatgtaatcttttaaggaattaagcccacgaatttatcctgtgtgaggagactctgcctaggcatcctctgagaacaacatgagggatattgtcacctgtcaaatggcctagaaatctgccatgtcgccacttgtcaccatctctgtttcttacctgatgtgtctttcttctcctttctgcataatcaaaagctcttgattcccacctgtccctttgagccttgtttctgacaccccaaggtctctcatctatagacacagtctcgctggcacgtttatagcagggatgattggttctggacccagaggctgttgctgaagctctctactgaaaaattgctcaggccagagaaacatgccaggggaagggctctcccaggctctcaaaattgttccatcttgataatctccctaagcagatttctgaattgaatctgctgttgatccatcttcagcttagccctgtgtggccaaatatatccatatgaaatcacctcatcggcttctgaatgatttaggtcacctttgagcagcatatccttctgccacatcattgtctaatgtaacaacaaagtgggagcctgcttcaaaaaggatgattcaatttacaacaaaagtaaacaaataacatgtctttactatttcaacatggcatcaataatcaggctcctaacacaatacccacttgacacagaaattttagcaccaccattgttcattagtagagtcagttcagatacagcacttgctttctgaaacatgagctacttcaatcatgaatggtaaggaacacaataccaggataatacagaaatagcaaccttgtttctcttgaccacttagtatatactctgccaccaagtaacagcggttaccacagagtacagaacaaagaggaatctgacaggctgtaggaattaatacccaatatttcttgctctcagctcatctggccatgtgtttcatcttagaaggatctactttgcttgttctttatcatcttcatgtgtctttgttttgctttagtggtactcagaacctggggtcttgctcatgctaggctcaagcactctaccgctgggatgcatcccaagtccccttcatattcatgcccttgtcttctctccagcattcaatctttctctatatgaccttctactcaacaggggattttttttttttagctaagctttcttataaggtgaaattcataatttggtgtgttgtaacttaatttattcctaatttttacaataaaatacctagtgattttgaaactgaataaattttaagtggtatgtcctaaaccataaaccttttcctgtaacacctttgatgttttgcatgcttttgaagaatgggaggagattgcctcatgacaagtgatgctatgcaaaaaacttggcattgaaaatttttcacagagagatttcaaatccaacaagatcatttatatgagattttctgtcttttatggcacttttcatttttttgcaggtatacaatgtattttgatcatatccacccccacttctcccctgcaattcaccattaaccttcctgcctcaaaatgcccctctcttaacttcaagtcctctacacacacacacacacacacacacacacacacacacacacacgcacacaccactgagttcaattagaactgccaatattcacagatatacatatgtgattgtggggccattcactggagcctggttaatacaccagtggccacatacaccccaaaaatgattctgcctccactagaagctatcaactgccgatagctccttagataagaatagaatctcataatcccccacccaaaccatactggaaatttgattggatcagtcttgttaggtcttaagcagtcaaccacaactgttgttggttcatgaattcaatggccatgtgtccaaaagacaacatttcacagctcttttccccatcctctggtttctacattttttctggctcccccttctgtaacgtttcatgagccttgtgggggtgatatgactgtcctgtttggtactgaatactcaaagccatttttcttaacattttgagtagttatacgcctctgcagcaaccactgaccactgcaaaaccaagtttgtctagccaaggttaagagcaacacagaactatgtatataaaaatatttaggtggaattttgacagcatgaccatatagcaagactgcaatagcatgcccctgtaatacgagttctaattggtcttaataataaaaacccagagtcagatattggggtacatgctaaaagatcagagagacaaaggagcaagccacagccacctcttacctcaccaacttctcaaccgaaaaatagactgcagcctcctatctcctcctgccttacaaccctctttccatccaactgtatcacttcctgtctgtctgtacagacctccagtcctctatggttaactagtggctagttctgccctctgatcttcaggaaaacttcatttgttagagtacaaacaagatgtccccacatgcccccacccagctccccaaccattgacctttgaccaggttttctattctatgaaataggcctcagatccaatctgaaagtcattggttatcccttaaaagccatgccactctgcaccagtgagcacgtcttaccttagacatcaatattgtagcatgcagggtccatcactaagaaaaacccctcccctgacttttctcccacggaagactgaataggaccctgtaccaaaaactgaagctagattctacatagaaactatgtttttaaagggctcctaaagctgtccagtggtggtgcacgcctttaatcccagtacttgggaggcagatctctgtgagttcacaaccagcctggtctacagagagagttccgggacagccaaagctacacagagaaacactatcttgaaaaaaaaaatttaaaggtgctcctaaaattcaacaacatacagttgtttgcctaaaacctgctaatttaagtagcagaagagcagaatgccaagaaaaaagaaattctatatagggatcttcagttgatttttttcaccacaatatagcataaatctgaaagtagttgcttatgaagaacttaaaccaggaatcaaaggagttctctctccccacctttcagcccttctcagactgaaggaccctcaaccctagttcaaaattagaagtagaagaataacccagagtaggccagatcatcattcctacatttagccatgatcatggatgcaaaagtgtgaaataataacctagcttccagaattcatcctaggatacagcacagacttgctaacagaagaaaggggctggtgagacttgggaaacacacagactggaatcaggatgagatctcacaggaataatggtgagggtgggagggaggtcttctcaacagtactcactaataaatagacctgcaagtgcctcactttgtaaccatcaggctgttttaaaacagaagctatattggaccctgtaatctacaagtcccattcctccccaaacccacccatctccctcaacctgagtggctcactgagattcctcttagactctacattgaggctttctcttcttcaaagatctagttggtcccttggattcctcactttattaactactgggtcaaagcattgtatcagccttagtccacttgtttgctgtccttcttccgagtgaaggcatagacttcttcacatcatgtttaatttttatgtctataaaaaatactttaatgaattagacagaaataaacaaaaataactaacatgacacattaggtgatatttgagaatgccctccaataaagagatgtccttgtgtcttttgctaaatgtctctatgttagtcctgcactcatcaacaagatcacatcatcatctctgttttgaggcacatcctactgtcttctctgtggggctttgtatccatggaccagctcttctattttccaggagatctatgaaacaaaatgataaacatcagacaccatcatacacacaaacacacatgtacatacacacactgatgctgagtcggctcagtgtgaagtgcagggcacctacgctgctcatttctgtggaagtcgccagtgcagttgggatcctcattcccttctgctttgacttcctgggtctatcatactggataagctaaaaactgccttatcgaaatctttggatcctaataagaaagataaggacccagttctccctggggccctgggtcagtactgagcactgttaaaacctgaaaatttactattagtgttaatgatacattctaagtccttgctatgagcactccttctaatgtttcttttcctgaaaacaagcacagacattgagggatggacaactggacttgctatttagcatctgttggacaattctcttgctgccttggctgccttgggcaaaaggactattagtcagccagccagcctacccttatggcagcatcagccattttgaacattctgtggatgccttgagaaaatgatgcaaagattacagctgttttttccctgactcctgaaagcaccgtcagctaaggttatttgaaatcgtttgctccaggctttttgctattacatcttctaaatgaccttgcagtcatttctatgtggaccaggaggatccatttcccttgggtggcaagaagagagattgctatgacttgtttaactaaggaagtaagactgtgattggcacacaacacaaactccagtgactgagattcttcatgtgaagtgatgatttaaacggctgtgattggcctaaaacaaaggccatgactggtccaagaatccctcctcaaagtctgcttacacttacttactcgatgcgctgggaaattctcctgtgttgcctccaatcattttgcaacagttggcccggtaaaagtctcttgtctggtggtcttgccttgcatacttttagaagtgtgggctgagctagcaactgagaaaaacagcaacagagaacagagtggagatggtgtcagtgcaacaaagcaaccagatgccctgtgaatgcagcaagacagatggctgtgtgacacctgaaaaggaaactcctcaacaaatgggtgacagccaaagtaggaagggggatggggagatccaatgagagaaagaaaagctgaagctgaagggtaaaaggcttttaggagccaaagaagaaagactgatcacgagaagtggggtttttgagggcccacagtctttaggaccaaccgagtcagaacctgggtcaagaactgtgacattgcctgatgtcaagggctgagggagtcccctacctaagccagactggaagctacaacaccagctgtattaattctgcccaccaagcccccacctgccctctgccactactggctactgtgaagcaccaaagaaagggaaagctgccagagacctgccctcgaagagttttccctccctccccactgtctctacccaggcatctcccaaagcatctaatcacgcaagcctgagcagactgcccatatagcaaaaggaccctcacaggcaactgactagtaacactgaggttagacactgatgtgggtttagttaactagaaacactcacgggtttccaaggtgatttctagatcccgtgtcccactggactgagccaccgaagcaggtatctactgagctatctcagacgctgctcctcttacctcctatttcacaataaccctctctccatcctacacgagaaaaacacacttttatgttgctttcagagtgaagctgttagagaatacagctttcccttctcatgtataaaatgtaactgtaatgtctggtgagttactagaatggctccttatagcattatatggttatttctttttttaagataggatcccaccacatagcccaggatagccttgaatttgcgaccctcttgctttggtgccccactgctgggattacaggtatgaaccccctcactcaactgctaatatatgcagttatgtaccccagacattttcaaaataaataatatgctttttatggtacttcttgtttcataaaaatcaagaacgtgatttatatgttatctgatttttttaacttgctataaaaatcaataatcacattcatctacatcattttaatttagatattgttgatttcagtaatctatatcacaagtttcttcccataatttatttctagtggtttttataactgtctttggaagtacaaatttaagtagtaaaatgtgttccttgaatatataaaatttaattattcatcaacaaaattcttacgtttacttagttataatgaaaatttttgtggtacaaatgtttccaatatctgaataatttagtactattagaggtagtaaatttttacttcttgaaatacagtctttttaacttgaatcttttgatgagatgaattatactcacatatttaatatgtatgagtacacacacagacaatatctcctattgccagttcctcaggatccgcgcttatttggaaatgatgtttgttcaggtgatgtagtagggtggccccaaatcaatgtcatttttagaagacagacatgtgaaaaacatatggagttacctggaacgatgagggcactggctagagtgatgtcactgcaggctgtctaatgccaaagattgccagcaaactacccaaggctaggaagaggcaggagaagattccaattccccctacaagcttaaacgggagcacaacactgtagaaaccttgatttcagaatccagtgcccagagtgaccatgtttattgtcacccgatttgtgacacactgtctctcaactccaccaaatcatccagatggattttgtacaagtttgatttcagcctcaaaatgaaagtatcacttctgaataaaagggagccaaacacatgcagcatttgcactgtttttacggttgctggactgtggctgaagaagaatggattcctttggacaaaataaggctgaggtctgagagaatgcggtgtttacatagagccaagcactgacaaaaacataatgaaagtttttaatcaaagttccaaggtctaccaaagtagaactgggaagaaaacaaacactggtgtgaaacatactgtcttacagaaagcgttcttttctttccaccagcaaccactcgattctgctttgtgctctgcacaaaacacagccaacaataatatgggaagactctttcatgcagtgtgtagtgacttatttacagaacatttagactccaaaattaaatcaattaattccttttgaggaaaccgaagagcactagcaaaattatcagtaagcttagcatttaaactcaattatcaagattgactggagagcctcccaagaattagtattgctagttgcaaatttttctggtgaaaataggattgctcatacaaatatcaaaaaatattttacctggtgcattgttgataagtagacaaataaatgtttttcaatgccaccaagttggagttcatgtgtcgagtctgcatggcaattaagtataatccctagtctaacattatttgtatttatatggtgaataaaatgaccaaattaataataataatagcaagcagttcagtagtatttactaagtgctaattctgggtgcattctcatagtaggccaattaatttgggggtcaaacattatccacagcttgtagatgaggaaacagaggcactgagaaactgttggccaggttatagaaaaaaatatgccagataatgaatgcattataggtagaaaaattcatagatatcagtcatccttttcaggtaataagttatatccacatgagtaaagaagaaaatacatgcaaagaatacattgatagtgttgtttctttagtttggaagggttcctattattattattgatttatcttatattaggtatgagacacaggtctctataattaaaattgttctcagaccaacttcatgggtgagcaaccaagacaattcctgttcttgggaaacgatcattttttaaagagcccacacattcattttactcttaattttatgagttctgtaaacaatcctgactattacaatggcaatacccaagtggagtttcacttctcttatctgcactttggaacttgatgccagaggatatgatttggttggtatacaaatttttgttgcaaaaaaaaaaaagaaagtagtattctgccttgtagggagtattggatgctgccatttgaagtgtcactattataaaatcaggggcttaaactggcatctttttacactgacatgtggggaaatggaatcatttactccagctagctgcttggattcaggaacgagatggttgtcatggggatgcataatggcatgtttatttgaattgaatatgaagtcagagtcagactttttctgaccaaaagaaaaaaaaagttgatttggctgattgggttgacaatgaatagtggctttgctcattagacaagatggacatatgctttcatttgcccaggccagttgtcctggcataattagtagcccaccatcaagttatgtggtggataatttccatgcattgagtttaaatggctagaggcttttaactgccccctaagtgtacccaataaaggtgtgctatcaaaaccatattactagtaaaggtgatttgaaggttcctaatcattcctaagcatatcaggctaaactggcacctcttaaaggacaaccacaaaatgcagggtctatggtggccttcatagagtatttttacatagctaagcgaaatttaaaactagaaaacaaacctacatttttatttgtcttcactaaataaaaggagagtctaatcagtttaaagaatgtcatttataacttatatgatgcaggatttgtgatcagaggcaaatagcctgagaagaatcaagcataaaactttctcttgtctgggactataactcagtagtatagtgcttgcaagaaaaaaaatttttcgtctggccctttttgcttatttgcatgaatacagttcctcagaaactacattttaaaagacaggcaacagaaacagaactgattctggacccaatttattctcgctctgaggaatattcatttacagatatataagctaacagaaaacgagtgaagtgagtcattgcaaacatgagggaaaggacatctgcatgacagaaaagtattaattccaaagaggaaaagtgggataccggagtagagaaatctgacagccgttccatcagtgaagtgatccaagtcagtgtcgtgaatgtgatacgtttggaggtgagaaaatcagaagtgaacggctcacaaggtgctcatcctcacgaatggactaatgcagctcctgggggggtggttcgttgccatgggagtggtcttacgtaagaatgagctctggcccttttgtttccttgccccaaccctctcttgtatatcatatcaccatgtgacaatctccaccatgttaccatacaagacaaaggcatccaccaaatgcagccctttcagtgctggcctctcagcttccagaactatgtgccaaaacttcttcatattacaaattacacagtctgtggtattctgctaaagcctgttaataagcagctactttattttcaaagaggaaaaagttagtcttcttcccttaagattgttttatattgtttgcttgttctttgaaacaaggcctttctatgtaagcctgaatggcctggaacttgctacatagaccatgctggccttgaactcacagagatcccctcgcttctgcctaccgagtgctggaattaagcacggccaccctgggcttcttcccttactcctaatccctaaatgctgctctcatttctgttgtatttttccagttttatttatttccagtgtgcttatcctgctctacatacaacatgatataatttcatcttatgtttattttccattgtctgtatctcccactggaacgtgagcttcatgggaaagcagaggtttttgtttttttattttcttcactgatttatcttgcttttagaacagtatacgggtgtgtaaatattcattgaataaattaaaaatacccaattctgggcagaaggtaggatatatttgaagcaatgttttgcaggcattttaaatttctccaaataaaacagtggattacaaaagtgaagcgcaggacttttactttcggcaatgtaagacagaaaaactctaaaatataaaatatttagaaattctaggggaaaaaatatgaaaacatgcttttaagtacatggataaagaaaaaaaaggaaaaaaagaaaagccctgagagaccagattaaagggggtgggaaagcaagagagaagggccgtaagcatacatggccgtcttacctggcaacatctaggcagccaggctgtgtacaggtcacaaataagatgcagttcctatcatggatgtcaatgaggaggcctcggcaccctagggggcctctggtagtggattagtatttttccctggtataagaagggactttcagagcccatcccacgtgaagggatgcactcttgccctggacacatggagaagggcctaggcccagcccaggttgatgtggtggactttgaggagcccctgtggagggccctaccctgccaggggagtggagggtggatagggtggggtaggtcgggtggggaggaggggtgtgggtgagggagggagagggagaagggattgacatgtgaaacaagcttgttcataatttgaactaataaataaataaataaataaataaataaataaataaataaataaaaagatccagttcctacacatacatgcacccacaaatacacacaaatgtgccaagacatcacagggccacatcctcactgaaacagttatagaaacagaaaagtgtgtcatacattttcttaaatttatccctggttgggaaagtttgacaaactaaaaaccagaggcctccacactaacaatagttaagggagagcttagagaaagaagaaactgagctatgtaacccatcacacaagagcaggattttatatacctcctgtcataaaatttaatccttccctaccaattacttgaggcagatggaataaatctctatccctaaagatcaatgaatgccagaaattaaggaacttctcataaaaaaattttttaaagttgcctgtaacttgatagaaaatatcaaaggggcacctggtcaactgaaaatgctcctactacccaaagctaaaaagcaaaaatagtattgaatttatactataaatatagtataaatatccgtggtccatatcagtgtaaatacatggctgagtgaataaatgaggagggaagataactatatcgtataggattccaaataatttccatacataggaaactctcaaaagagaggcttttgtaagggcagagactataaccctccactcctggtgtgggggctgccagagtgaattctgtgcaaagagagtgggagtatggagacctgggtagggcaggatagcttgagtagagaagcttaagaaacactccctccgccagtgattaaggtcaaaatcaacagtcacaaatcacactgataatctctacccttgatatacgatgatgaaatggtgctttaactctgaggtcttccagtgaaacgccaagaggaaagcatcagacagactccaacagaagagcatcagtggtgatatatctagcccatacgccaaactgtcaaggtcagcagacgtaaggaaggtcagagaaccagccaacaagagcctaaggagactcagggactaaatgcaaatatagtacctgatgtgatcctaccacagcgaaaagctaccagggaaaactaaggaaatctgttgaactaagactttgacagtgtatcaattcattatcagtccattaattatgacagatttaccatcctagtataaaatttttatagtaggggaaactctcagtaggagagatggaaccggcatgtgaaagcttctgtaatatctactcaatatttctttaaatttaaaaggaaaatgtgcagagagtgagagactttgaagcaataagtcctgcatgggatgtctttatcaaaacccctccccttggggctcagagagctgtgaggcaggggaagacttgtaagagccagggggtgaatgacaccaaggaaactgtggaactcacggagactgtttatagcacaccaagaccagccaggttcgagccaaacagggtcccagcactgagggaaagtggatgcaggctcccattcctcactgagaagctctttgcaattgacgtccactggcaaagcaaaggaaaaaaatcaattctctcccgtgaagtctcacggagtttatcaaccacactccaggacaggccccatgtccaggagttggccaacacaaaacaaactcagtggtgttttgtagactttttgtctcattttcctttgtttgggcattttttcccctcatttttatttccattttttgtgttttggtggggaggctgtatatgtgtgtttcaggggttttgttttgtcttggtttgcgtttgtttgtttgtttgcttgcttgctttaaagaaagaggaaataatatgggtggataggcaagtgggaggatctgggaaaaattgggggaggggagaaacatgatcaaaatatactgtatgaaaaaaattaaataaaatgtaatataaattttatcataaatgacataataaatcaagcttaataataaatatatgtttatttactatagtgatagtagataaagtggaaaacttttctacttctaaatttaagaataatttacatgaattctagtagtttcccttccccataggctggggtgttcaaaatagtagtctgaaaccagagacagtgccaagcccagtactatgtttctttttcctgttcagacacatcttgtcaaagcaagcattttctgctctccactttatttggtatgcctcaatcgtcaacatcgtttgggggcaatgattaaataagggttggttgagtataaacgctgcgataccctgacagtctgtctgataacctgggaagttactaacaagcaagccgcagatacagggtggatgcactgggaaagagtggaataggatgccgtgagatttccaccatgtttctcagaatggcttccaatttcaacttctgaattgtttatttcttaaattttccattgaatgtttcagaacacagttgccaacagtaacaaaactcagagagggaagccacagataagagaccgctgtacagcatgttgccttcagagagagctcactaagtaatatggtggggggattcaccactggtaaggaaaatgacccggtttctgcaataaaattgcaagaaaggggtgaaaaatggaagcacactaaaagactaaggaggtgtccatgctaaccagatgtgaattctttgtctggatactggcttaaactggcaagcttggctcaatttgttctctgtctgactcgtgctgcctgggttctcctgctttttaaaaagtactgtctgcacccaaagccatgtcttggagtctttttctggagaaattcaagcaaggatacccatgacttagtcatcaattatataaactatagtgcagtcacacatcagcactctgtgtaataattaaaatagtgtgtgctatctgcatgcgtcaatatggaaagatctcaagaaacttcataaagtatgattctccaaagactctactgtgctggcaagctgactatgcagggaaaagagagccttaaactgtagcatgtcctgacttccaggctgtgcatacgccacactgctatgtcttatttctggctccccatgacttactaagaatcataacttctaagactcatgcatccttagaaaccaactgtttgtcacctccagcacacccctaggtggaaacctgcattgagttttatcattgtatatactggttggatttaagagaagagctggggatattcctcggttattatacacaaagccgctgagttcagctcccagcctgacgttacagccaggcacggtggcatattctagcactctgaaagtttaaggcattcctcagctgcacaatcagtcaaggctagctcggggtatcagagactacacaagagttagcgggtgtgggggacaaaagaaaactgttgaacattgactaagttttcatttccagttctgttacacatagccttggaagggagcccaggcccacattcccggccacaaaggaaatcagtcagcagagatcaagataaaggcaatgtgcccttgctattatcttcttttctaggttgtcataagaatacccattggtgaacaaaaggaacagaggtcagcgtgtacgtgcaatggagtctccgacagtttatgagaccaaatacctcagaaggtgggatcataaacaggaaatggaatgtagagctctgggaaaagaagacagagacattacaatttataggaccattttttcgaccccagtctcctttgaaaaccatttcagagccattttcttttaaagtggctactacggccagaaaataaagcaggtaattctcgaatctgttcctatcattattcatcaaagagcctgacttcttggttgcaaggagatttcatagaaagaacatttaattagaaaaaatttttaagaattcacattatcatcctaacacagtattttactgcaaaagttcgaaccgataacttaacctctctgggccccagctgctcacatctattaaataagaacttgagcgtctccagtttaaaaaaaaaaatctacaattctgttatttctgatggccaaatcctcttttaaaaagccgattctctcaagaactcagatcctctggaaagtcctctggggtcaaacagaaagacaagggcaagaattggtgccttcttgtggacagtggcgacatagctccagggcctgagaagggcaagatttccatccaagaggctgcgtagccccataccacagcagctccttgggaagagacatttcatcagtgtcaactggtccaggatatgaaggatgacggactcttccacggacagtgtccatcccgcctgaggcaacaaaatgcctctccagtttctccctcctttatttccttctccaaaccagccctttacaaagtccccactggcacaatactaatcctatttccagacgctttgggcttgtctcttcaagaacatcctcactggggtgctttcaagttttggaaagtaattgtgtgtaggctgtgggtacagctcaagtttacacaagcatgaggaccctgagttcaaatgccaggcatagcaatgcacaattatgatcccatggctagggaggtaaagacaggagaatccctgggattgggtggcctgctaacctaacctaatggggggaggagaatcagtgagagacctttatggtgaattattatttataatttattaaagcttgcctgaggattcagaaagcaaagccagctacaagccaaagaagccaggcacacacctttaatcccagggctcaggattaagaggaagatggatctctgttagttcaaggccacactgaccacacaaaattgatccagtgctaagagaaacagctctcacagagatgatctcagcacttggtatcacacgcctttaatcccagcactggagaggtataaaagataggagcagggtgttaagtaggctcagtctcaggattctctccagccacagtgaggagaggaggtagtctgaggtttggtgaagagctcatggatcatccctttcagcctgagctagaggcgagagctagtgactggctgctttcttttctgatcttcagcttgaagcttgaacccccatatctgtctctgggtcttttttcttatgctacagaacttgtttcaaaaaatacgtgggagctaatgaatatgtggttaagggctcatactgatcttgcaaaggacccaagttcagatcccattacccacactggacatctgttactcaagttccaggggatctaaaatcctctctggcctccaaggacacacacacacacacacacacacacacacacacacacacacacacacacacacacacaccttttagaaacttaattacaaactttatttatttactctatgcagatgttttgtctgcattctatcacctgcatgcctgctgtccatggaggccagaaaaaggcattggatcccctgggactggagttacagatagttgtaaaccacagtgtggatgcttggactcaaacccaggtcctttggaagaggagtcagtactctgaacctcaaagccccaataaatctttggaaagtgggcatctcctgaggaatgacacctaaggcttatcgctagcctccacacatctgcacacacatatacagaggggggggggactgtatctgaggctagctttgaagccatctgagtataaaagaggagcaaagaatcctgagagagagacagggagacagagacagagagagccctagaggggttgatgttattactgtgtgttactgtggtccctggtggcaagggaaagccaactccagctcaccgtgaggccggggaagactcagacagaagaaaggccaacagaagctccctccatttagtgtaaaacctcataagtatcagttgactctttacaaagcctaagagcccctcccctgaggcttgtgggggaaatgaaagagtaaaggcaagtaattttctctaagagctgaggcctcactctgtcacttggattgttagggagcataaatcccagcaatgatcacagagatcatcatgccactttctacagcataaaaatgtctcttagtgcattaccttatggattctcacaaccacctgtgaggtatagataggtatggtgggggaggggagcaggagctttaaggttcaggcctggtcaccaccttggaagtgaagagagttgcctcccttggggtgggctgtcacctttattttacagatttaaaaactgaggcctgagtgagctaagtgatgcatctccaacaactggggactgcatggggcaaagtggaaagaaaaaaaaacttgaaacaacagcttctttactacatgatattaacataaaaatggatggacaccatatctggactgcagcaggcagagtagacaaaagtagcaccacagaggtgaagaaggtatgaaatccatcactgagaaactaactttggccaggcgtgatggagcttgcctgtaatcctagcacttgggaggaggaggggctaaggcagaaggattgtgagttagatatcaacctgatcgtcatactaaaaccctccctgctttttaaagaagtgaacatgggttgattattggggaaataactgtgagcaggccaacctaaggggaaccccaaaagaacaaagcaaaggagtggcaatgatatacaccataactccaaatccaagatgaccttgagttgtcaaggtctcacaaagggagtcatttaaacacgtcctgtggaggtccagagagagagagattgaagctccacctaattacaaaagacccagaccccatctaattcatgaaccggccatttccattaggtgatttctaatctcggagtcaggctgaatgctaagatttggctgtattatgtgttttcagtctgtgggaagcaaaggactgggccacagaactcagctctctttccaggagacttccagaaatcttagccaacatcttctgcttaaatcttattggccagaacttcatcacataatcaaatctaactgcaaaggaggttaggaatagcactctcttagatgttatatatcatactattaagtaaaatcagggtttctgggaaaagacaaaaccataggtattgagtgagcaaagatcaggaaggtgctgccacaacaatatattatccagatgatgttggtgagctgggtcacgtggtctcagctgacttcagtgtagactaggtgcaaaatccctgcagtgctgaaggtactattgatgggatcctagcaggaaaagagaggcataactcaggtgtgaggttagcagtgtggtgggacaccgtgcaggctcggtgggatggagagggcagtgcacagctagcctgcaccatgcataagtcacacccggggtcagagaaaagtgcacatagctaggctgttgtccatggcatgaggactgtgcagcactcatgggtttagaaggtcaatgtgtgtctttggactgtagaggtaaagagactttatacccattttgcagcttttttttttttttttttttttttggtttttcaagacagggtttctctgtattgttttggagcctgtcctggaactctcctcaaactcagagatccgcctgcctctgcctcccgagtgctgggattaaaggtgtgctccaccaacacccagccttcactttgcagcttttaaagaacatcagttcctatgaactcgtcatgaagaccagggaaaagtgtgaaatattctgtgctcaccaagccttgacgtaggaggtttgcagtcgaagaagtctgccttcatcagagagtgtcacatttccaggagcacgtgactccttgagggttctaagcaggctccacttcgctgttgccctcccatggccaactttcctagggttagcaagctccatacatcacatcaggcaggtttatacacctcgacccgaaaccaagacagctaacaaattaccgtgacacgttgattgcttgccttatctcaccctggaggcctccagagtcctctttcccatcaccacaaactcttccaattaccgcattggtttatcggggactattttcttggtgttccattctgctcaccgtgaccttggctgtctgattgatacatccttgagttgttgctctgtccctcttagatttgcttatctctgcctctgtttctataggatgttttattaccacacagacttagccggtggcccctatggcatcatctcacaccaactgtcactcaagcaaactcagaacatctataggtggcctttgtgaaagagatctccaaacacagaataccaaacatgttgcttcatcagacttcttgagttgtacaatggaaggaaatcattacttggcatttcaaaggacagcagagaatttcagcacacgcttggaatgaagttctatggcccatgccaagcaaataacaggaaataatgatgggtcatgtgattaccaagcattgtcccaagtgctttctgtggtcagtatccctaactccatcaaaccctgaagctcagagagcaactacagatgcactgtggagtataacagggtgctgtcaagtgtggcattgtggaaaacaactgccatataaggcccacctgaaactgcttagtgaaggttagaaatggtgttgacagcatggcatctgactcatcaattatctgtcaaaaccaattatagctccacaaacaaatttcaagtagattttgtttttcaaaacagggtcttcctatgtagccctggctggcctggaaatcactaagtagggagacaaggctatcctcaggctcacagacattcatcttcctctgcctctacctcctgcatgctcagtgggaattcttaggaacgatgatctgaaagaacaattactttagggcccaccataccctgctttgcagatacaatggtgtgttttggaggaatgataagaaattaatcttgagcttgttggccaagagttccccaggactggatgctctctcaacatacatgcagtgcttgctgccaattttgctggtatgcgatactgagtttgcctttccaactgaggatcttgatttggataaattagcctggatgtggggaaaaaaaccttcctttcataatatcctattgagataagttatgagttcatactgctgaaattactcctaaaatgtagactctgcagggaaactgacttttgttcactgttagcataaaaaagaagcataagaaattgtcacccatgaataccatatcaaatattcttcatcacaggaatagagatggtgttctttggagaggtggaatgaccccaatttcaggacactgtaggaactcaatagaattctgtaatactatattataatttataaaggcataactaactcaacaacaggaaagaattatcattccttgattataaactatatctgttgaagcttctttgaattattacttataaaattaacttcataatgagaaacatcatgagaattgtgccagatgctagatgaagctatgaggactcctccagcactcctattgttcaccagactgctcaataagattgaagccccttgctggatcagagctaatgccgatgaggcaacccagagcaccatgggaagccaggcagagaaacacaacaattctcagaattacaggtgtgggctgaaaactggtaaagtccatatggctcagaagctcactgaacagtcagggatgaagattaagtctgtgggtttagaaccaagccagtagtcaggaagcagaaaacccataggaatcagagagcaccaagagtccacgtatcagaaaagaagtgaaaaagtctaaaccttgagggacaaggcaccatcttgatcgtcttagagcttgctaccttgggcgagaagacttattccatttctgtgagaacagattatacataaccagtccaggttgtccaaacataagctgggcatcttgccaaaggacttccatatggtgctcacagaggccagaaccagaagctacccatataacatcaaggtggggcacaccagccagaaagatgtactaagagtcaggggaagaggtgtgtgtggaaacccaccaactttgtaacaacgctcacctaatcagtgctatttcccactggtaccttttccagtcctggtaccctttccctgctgtttctcaggcccaggaattccacactgcccatctgaggttcagttccttcctgggaggcacagtacaggggcttccttccccaggccttaacgctttccgggtgagaaaatgtgtgcttttgtgtgtgagcatgtgcatgtgtctttctttttttttttttttaaccacatcacagatgccaaggggaaaggattgtattagagcaactgtgatgtaaagatgatgaagtcacctggctgtcctacaggtattatctggaggcaaagaactaattactatgaaagctccaccagagctccaccccagcactccagaggaacagtggttgaaaaaactaattgttttttttttctaattacttaaacatatgactttaatttgtagttctttaaaaaaaaaactgttggtttttcttcacaaaaaagaaatgcgtattaatctagacttctaaggtctctgtttaaaggcgataactgaatcaccctccctatctccctttttaatcagatatagttctaggaataaacacagatgatttgaattttaatgatttccaaaaactgatacttgactgtgtaaaaaagaaatcagacatttcagttttctaggacaagggaagaaattattgcagaggccacactgcacaatggagaaatcatgaactcaatatcacctttgctagtccctcttcatccgcggcccccatctcttcacacgctaataatacagactttcagagttcctgtgaaaattacagagcatgcctatggagtgcctggtgcagcaagcacatcacaggtgtttgatgaatcgtagcaaatgttattattagctcgcttatctaagatgatccccatcatcttccacggtaaacacattgcttccttgtcaaaagaacacagtgcatggctgcaaatgctcccagatagagtgaccaaaattccattctaagggctgaaaattgggcaaccaatcccagtcctatcaccaggcagctgtgtgagtctgaaaaacaacaaacctctgtacctttgcttccttatctgaaaattgaaggtgctgtctgattagcttgctaagcccagagagggctagagaaaggctgtccctatttgaggacagcccgttcctagatgaccagcttttgcctactgtagcacttcaccttcctacctctcacccccaatcctgactctgatatctggaccctgcccaaacaacgcaaatggacttggatcagtaagaccagatatcaacacaccactgacaccactcccggagatctgggataatgtgttaagttatctgaagcctcagttttctcctctgtaaaagtgcaagagtaataatcacctcgatgagtttttataaggattaaaatgatatgtacacaaaaatgagttatgagctacacagcattgtgcaatgctaatatagcaacagtgattattggtgactaatgccattgaaactctatggacagcagcccaagaagtcggactctgagtcagacatttgagagtcatcaatctcagctcctgccccttgtggattttgtgaggttggtgaaatccggcagaatgacattgaactttgctgtaatcggatattgattctggttttcctaacagagaacagaggtttgtttaaacttttacttagaggcaagtgacaggaactggttttaatggtccggaaaagttttcaccccattagcaatagcctacccatgtgacctgaggttttcctatttcgagaggcaactgcagaatttctggagagccaccttgtactaatggtaacaaatctatcagttgctggaaagaaccatagaccgactgccacatagctctgagttctacagatttcttgggctgactattgcccagaacagcagccttctgtggtcataaagaagccttaggaaaagtctgcctaacaagaagtcgagtgtgccagtgggtttcttagatgtgtcctgagacgcccagctgcagtgttgtggaacctcttccagaattttcgcctccataccaaagtggaaaagctatttattaatacaaggttttgagcagttgctttagaacatactttcaggtgtatagttttctgagcagtcagccctgggaaggctttaatctctctctccatttctccatcttactccctcctcgcctccctctgaccttcctatcaacacctgcagatcacatgcccctagacagacaggctggacccataaacagaagagtaagcaaccacccatatggtgtaattggagatgcctcacaatccccactgcccaaaatatcttccccaccaaatgtcatggtgccgaaaatccccagcattaaactagacactactaatatctccttcctttgcctcatctttccaagtgtctgcaccatgtaagctgacttaccctctgaacttagctgtgttatcgttcacgccccacgactccgtgattcccccagctgtaagtgatctctcattcccagggggaaaatcacaagcttaattcgtacctgttttatgatacatatcaccctgtgtttgaacacaggtcctatcattctggctataatctgaaacttccatccctcagctaggccttagtagtctttctccttccatcccatccccaggtgactaggctcagagctggcccctactgaagaaccacagtgagagcctcaggagtgaacttcagcaggactgagatcctgctactcactatctctgttcacctgcagagtcatctcaactttcagaaaacactgcagagttccaaataccagagctctgccaacaccataactagcccactaattgacctcacagcacatattggcttaataaagaccccccccatgactgactcaccttcatcctctgaagtggtttaacacttacttactgacacttatctactgtggtggggcatctgtcttaaagaattcaaaaggaagagaaagatgaggaagagtgaacacatagatgaaaattttctttcatcttattttcttacaaaactgggtgattaactcagctttgagcttgcaaacagcctcaaaatggtggcatgaaataccaatgtgctatcacctccctggggattaactggactcagctaagcagttgttactgggggactgttggggactacagtcagataacgtctatgccaagaatgacttgaagcctgggctgagagggctcaaacatctagaggctgaaatggctagtcttgctgctccaatgtcagtgagtgatctctccagataactatttaactttgggagtatcagaacagtcagaattcttatgaggatgttcaggtgagaagggaagtcttaccagtttgagtcaacctcccaagttaccatcacatctacttgctagattctacttgctagaaacaagacaactaagaccaacttgtattcaaaggaactatagttactcccagcttttgatggaggagtgtctaggactgtgagaacatgttttaaagccatcatcaatggcaaagtaaacgtttgcaaatcaataaacactattcctgacagccatggcagcatacgtctgtgatcctgtacaaagagggctggagttggagaatagtcagcctgggttacacagtgagaccctttgtcaataaaactaaaacctaataatatgcatttcaaaacatgtgattctggccaggcgggcgttggtggcacatgcctttaatcccagcactcaggaggcagaggcaggagcatctctgtgagttagaggccagcctagagcgagttccaacacagcctccaaagccacagagaaaaccctgtctcgaaaaaaaaaaaaatgagattcttttgaaaaccaaatttagggccagtataacctaatctaggggtaaaatgtaaaatatctagatatatgctgtcaaacatggaatctactggcataattggatatctaaacttaaattagacttaattaattgtaatttagctttaacttaattaaagttaactagttagaattaattaactaatttaaatttaaattaattaaaataagtaaaaaattctaagtatctttctgttataacagccaatttcaaatgcttcacagatacatacactcagtaccatcatgttgggtaccacaaataagaaacatttccatcatccaaaaatgttctcctggacaatgcagatttagaatgatgggaaaatatctcctccagctgtcaatcagaattgctttcccctttaattaagcttcagtaggcactgggcaggagagacagctaacttttaacactgggcatgagtaatccatgttgttgataagggatagtctatacttcttaccaatcaaaccaaacaggtagtaggctcacctcccttaagaatggggtctctggtggactttggggagccaccatcaagggccctaccctgcctggggagtggagggtggatggggtggggggcaggtgggaagttggggggagggttgggggaggggagggagaaggagcagggattgacatgtgaagcaagcttgttcctaatctggactaataaaaaaaaataaaaaaaagaatggggtctccaccccattctatatggagagataccctgctcagcctagacacagaggtgtggcgggtggggaggtgccttggtcctgcctcaacgagatgatgggacagacttagtagacttcctgtgggaggccttaccctttccgaggagcagatgggaggtgtggtgggggagaaatagggggaacaggaggagaagagggagggggaactgggattagaatgtaaaaaataaattaataaaaaaagtttttaaaaaatggggtctcctagacaagcccccaaacagctggccagccctcttccatgtggaggatttccaactagggtttgccttcagtcagcttcctaaaaaccatctgctttaaagagtgtggtaaagaaaactaaaatcaaagctgtgatgttcattctctcactccttcactcaaccaacatgtattgaccaggaataaatcctgtgtgctctgtgcctgaataaaaatgtgaagtagatttcactgattcctcagacccccaaagtagacagacaaatgtcaatagcacacacaccccaaaatctacttttaagtagcatccttttgtagtgaaaacactagagaaaaaaaaatggttgcaaaatgtaccctgacatagctgaaagaattagctcaccagatgcaattactagatattagccaattaaataaaaaaaatgctatctgccagagatgattttagaatttaaaaattttgaattcaagcaattctatttttcagtaagataaagggtccatttctggttagtgacaataaaatgatatcaccagcataaagaatagttatttttatacttcttataataggggtgagtgcagctagatcatgtccaagttgtttcaaatcatttagatacaaatttttttaaaaagaacctggaagaagcagagtcagaacacagttcaatttttcaaagactagacagataactagaattgttatctgatctatttccagaccactcccagaagctcttggggcctaagctcaaatggtacataagaatcgtaatcttgcatcccagctgtcatgaatgttgaaattcatcaccacccccgtccctgctcccctgttcttacaccgttcagtgcctctggaagcaggcttgtatgagacgcatctgcaggtccccttgccctcttcccttctaaaggagttctgccgaggggaagcaccagcaggagattagagggtgggaaaataggaggttagagtatctgtccctccagcacccttcctgccaggctgccatgggttggctgcattccttaactaaaggctatagctcatgtcgggcatcgttcttaatatagttatgctctctgaattcctctaatccctcactcctttgatcattcaggcctgcgaggtagtgtctccctgacagtataagctcttgcagggtttcctccgaactctttgtgcctttgtccattgtccttctaaactattcagttttcctcagaaactgatttctgacaaaccttgatgataccaattcattactggttttatgcatgaagatcaaaaacaaccaattaaatttatacacaaccttagagctcctaaaacacttctcaacaaatcgtaaagaacatggtcactgttgtaatattgtatctaaatccaatgtgttcatcctaaaatttattaagcacagaaaaatgtggactattgtttatgaaaagcatttcaatgcaatgtcgaccaaaatgatgaaactgtggtttgatagagaattcagggttatcatggactatacagcaaccatcaaaaaaattaaagcaagagaaaagagggtttagcagatgaaattattaatatttttaagaaaactgcagctcaaattggaacagaattcgagccattctggtactgaagaaccttcgaaggtgctttgtaaccaacagtaccctatgaagtaccgccagcttttgaccaacgaagatactacccactgaggccaaagaccacttcagttattcatgaactaaaggctcggatgctgccctgctcctggccattgtgttgctgtaatgaatgaaatccttgaagtcagacagacttatttccagatctctgagtgaaaaatcacgtataaagtaagagaaatggtatttccagtgtggagtacttgtggggatcaggtataaaaatacatgttcattaaaatcgctaactgaaattcaaaaacaaaattgaaagggactggagagaaggttcagcagttaagagcacttgctacattagcagaggaatggaattcagttccttgtacccatatcaagtggctcacaacgaccagtaactccaactctaagagactggacacccttttatggcatcctcaggcatccacaaacatatgcatacacacacacacacacacacacacacacaccatggaggaggaagagacagacagacataaattaacatagaaaaataaataagcaaatatgcaaattcccatttaaaagaataatccaaacagctgggaaccaaagacttccatctcaagatgatgacccagaaaatgccttgggtgagatggagaacaggctggtaaagtaacccaactcccaagggtcacctacattttaagaacctaaataatggatgaattcccttcctagctctcttctcttaaagcactgtatgtcccaagattaattaacatttccccagtcctccgtggtgattgtttcttactattacaaaatatctgggaagccagagctagctagtatggattggtgtaggcacctcatttgcaaccagagtgttcttccaactgtctgtggttcttctaacacctggttccagaaacgtcagggtgggaagccctagaggacctctggcttgctcttttgagatcattgcagttgagtaacaattcattcccttgtctggttagtcacctcaaaagccaagaggttgtaattatttcctcacaaaagagacatgctcccatctgtctcttggggtataccagagagtgtcattgactttacctctggatagaattcatatttatgagtcacttaaagaacaaggagaattttcaacaagaccactaaagggaccatgacaaattattttgacaaatgagagagggagaccattgcagggatggagtcggtgcacagtgtagtgaaagcacacatgacaaagacgaatcaactcagagcctctactcagtcccaggagctgactgacagatctctgaggccatggtccctgtgacactgagccgagtgttgctgtcccactgacccattggtgaaacattatgtgaacaaagaaaacaaaaacctaagaaatcaacatataggaaacaactactacgtgccaggcttagtacagcatatttgtgtattgtctcagttgatcctgtgggtaccatctttataagattctgagatgttaggtaacctgcccaaaattaatctgtaggatgagaattcaatccaggtctgcttgtttcctatcctatccacatccttttctgacatacattggtcaaggactggtccgttattcggtgtctttacacagagctctgaaagccagtgtgtctttcatcttttacacaaagctgtcaagagaaggtatcagtggctttcagctaactcaagtaagtggaccacattctccagcatccaatttattattataacttgattcttaacaatgacctcctgtatccatggcaggtcgctgcataataaattatccaaagttagcagcttaaggccaaaaacttttattatcacattattatggttcatgatcctgtaagtcacttacatctttcttccattggctttgcatggacccattttcaagggtgcagctaatttcaaaggagcttgggaataacatcaaactgagacagatggaggtcagtttctctatttctttctgtctctttctatctaattctgtctaactctgtctctctgtctatgtttctttctctctgtatctctgcctctgtctttctctctgcctctctctctgtccccctcctctctccctctctgacctttgacctaaagcaataaggtatcagtttcatatacactcatcacacaactgtgaaggagccatggagagccacataaccatcactggtccgcagcaattctgaaatccagtcacacccacaggcaaggccttctagtctggaaataggagtacagttttactctctggaagtggttgggcctgctaactaaaaaggctttctcacaaatggaaacaccctgtgttggtagctaagtgatttttcccaagttcttgtctcttttaatttcgactctcctgtgcactatttagtctaaatggatccaattctcttaaaagttttatggcctcctacatctcaagttatagttgactacgttaaacaaaagttatcctcacaactatttttgagtcatttatccaccttgtcaacatgttgaggtgctatggggaaatgccctttaagctattaaaggcccttccattacctgagtctcttaggatcactttaaataactctaggaacttaaatgctgttgtcatacctgtggtttcaactgtgttccaaagtcatttcttacttaaagaatctgttgccagctgaagataataacatatgaaagtttcatttcccaattcagcatttcctggacctgccatatctgctttaagttcttcctataaattgagttcttgtccggcgttggtggtgcacgcctttaatcccagcactcgggaagcagaggcagtcggatctctgtgagttcgaggccagctctggtctccagagtgagttccaggataggctccaaagctacacagagaaaccctgtctcgggaaaaaaaaaaaaaagaattctttccttactgcatctctgtctccctatgccctattatgtgtaaccttctaaaggcatttggtccctacagcattccaggtggacatctccttaaagcaaatccacaagtcgattgaacacattttctgccttccacattcctagatgtgacattgttaccagcttttcctccacagtataatgtgacttaccctttatcacctcttccagcaattccctgtcatgtcatcagggtccactaactccacttgctgccccacagcctccgccacccactcagtcctaaagccatggttacatggctttgatttttgttactgcaacacactacgtctagacactggtttttatgatttatatttcttcgtaagaaaaaaaatacccagcatggaataaagagatgggtcaaaggttaagagtcctcactgttcttgttaaggacttatgtgggttcctggcactcacatcacgtggcttaaaatctcctgtaacttcggatccaagggtccatagcccctctgtctttctgggcaccaacttgcacatggtacacacacacacacacacacacacacacacacacacacacacacacttttttaaatacccccacaaacttagtgaactaacaactattcatttctcatgattccatgagctgtcatttttctgctggtcatgcctggttgggctctctcgtgtagatgcttccatctgggaaatccttggagatgaagcttacctggcttcccatataacatggtttttagttctgggctgataaatgcacggtggtttcagggtttgagatgctgagtaccagtgtgcacatctttacccaacctctgcttccctctcacttgtttatgtcacattagccaaaacgggtcacatgggtgagcccagcaccagtgcgccagagaggtacaaaaggatgtgaataacaacagtgtgttcttttaagtcactgttgtaaagtccactctagtgccaatagctaagtttcatgctttttcctgtattcccactcaagcacataggccaacaatttgttcacccatgcatatttgctatgttcgtgtaaatgagttggaaatacacaggtcttagaaatacaagaaccagaaagactaagactgctcctgtgtgcaggcttaaaaaaacaaaagacttagaacaatgccaaccattaactaccatcttttcatgttctcatgaagcaagtgtctttttatcactgaggatctttacagtatcaagaatttcaaataaaggtctgactcattaagtgcgtgtttgctggagtcataccaattcaagaaataaattctgtatgaatttgaaaattcctcatcctaaatcactattcaaacatctgaaagatcatataatgacaatccctcagtatttgagcaggagagaaagaactgaatagaaccattggaatttcaaaaccagtatttgagtttggttaagatcagatgttagacataatttatcttcccatgtgaagatataggtatacttatttttcattaaaaataaagagaatcagggatgtgttttattgaatagtctcaaaaattctcttatcaatcattttgtccagaacaagtaggaatcttttatcagtagtaatgggtaatgatgaatacatttgattaacggtatcttgctttcaaaaattgatgtcatagaccctctccccaaagacaccttctcctcttgctaccaagtttgattttaataactcatgtatgtttgcatttccccccatgatgcagaatactccatcaaagcataacaaggggatttgctgagaactcaatttgtacatagtggggttttttgtgtttgtttgcttgcttgttatgcaattaaccttctgccttatgttgccagttccagcaaatgatgttcttactccaatcaatgaaacaacaggagaagttcctaaatacattctttgggactcctgggggtcactaatacactctatatttttaacctatcagctcttccaatgtggatcttactgtggcagcaatgatgatgagggagagaaggatcggggaggggaggagagccagcatttattgagctttcatggtcccaagcattgctcaaagcactttatgtaaattaatttatgtaatcctcacaactgttgaggcagggtgttgtgataatttcccctttgcacagacatgaacacagagacagaaagccatttttctggtaatacagtttttgaatggcacatcaggacttgaacccactaccaactctgttaattcaaagataccagtctcgtgcagaactcagccttctagccttcctctgactctattttcagcggcaagttactaacacacatataccttgacagtaatttaccctactttttgatgatttgcacaaactgttaataggcaatattgatgcctctggccagttacctaaccaaaagcatctcagccagacattctctccttagttgtctaggactctagattcttctggaactcaaatgggattgctactccatccactatcactacagttgtctgtatttcctctttctgtagccctggtgaccttctacctgtccagttctctgtaactcattattgccttccagagatcccctcatacacttgttgagtgacacataagccctgtgggatgagttcatatttttctcttcagcttcatcttatagcatgcctttgtaacaatgtttatccccatcactctgtgacactgtaggtggctgccaatcccacaaagctgggtctctgatgtgttatgcaattcttcacccattacactatattccaacccaacacacagtcagtcaaaatgtgcttccagggaacccaatgtatggcagggcctatggcaagcacagaaaacagacctggatccttggatcttttatccctaccatccctgacttccaacttagaaacatgattaattttggccaatctggaaataagaagaaggaagggatactttagaaaaaaaaaactcagactaaaccacctttataatgtcttgcaaccccacccccatcctcttgatttctctctaaggcaagcatttattagtttaatttcaacacacacacttgtacctgtaattactatataatgtctgtttacttttttaaacgaaaatgaatttaaattaatcttgttttgtgaatttcaaggcaccccctgagataaatgaagacactccagggtgtcatcaaaccagtgcttggaatccttgctctagaaagtggagaagcgagctcattaaaaccttcaaggagccagagggagaaatgcatgcagatatgcaggcagcaagagcacagaaaggagggagttttagatgtgcatcatatacagagtggggaaagggtgaccaccaaaatgtggttcttcgggaaaatttctaaaatttctcttagaaatttaaccatcaatgtcatttactcctaaggcctctctatcacagagttgacgatgaggacatttccaaagtccccttccttccctggtctgaatgtgatgtgtaaaagaaaagaaaggtgagtattattttccagcggtcagcaaatagaaagaagacaggtttgcagcatccaagtcaatttcttgagatgccttacatcagtactgcagactgagataactggtgggaattactcagaagtctttgaaatttacaacaggattgtttgccggtaatgattttgagagcatctcacttgggtcttacaggccaagctcatctgtgacctttgctgagcagcccatccaacaagtatataaactcagactccttacattgcttccctcctacctgggcagcacagagtggcttctccttcctctctctctctctctctctctctctctctctctctctctctctcctcctgtactttaattcttttaaaatattcatttgtatatcgtgttaccaaatgtttgaaatgtataataaacattccttgtagtgctggatttacccagaatcttgcatgtactaaacaaactctaccactaagccatacccacagatctatagagactctatggacgtgcaaaagaggcacataagcccagagtggtaaagaagccttcctaggacacgacacttggtttgcttccagactgaacactggtggagatacaatgttgcaacaagctaaagaacaggagagtgggtgaatgacaccgttggacaaagcaggaaagagcacactgcttctctgaggacccatgccttgctggctgatgaggacagacactgttacagaggcatgctgtaagatgaagctgaagagaaaaacaagaatctcatcccaaaggacttacgtgtcactcaacaagtgtacaagggggtctctggaaggcaagtgcagagtacttgatgggttaagatctgtattctgtttctcacttaaaaaaaaaaaaagatctgtattctacgggctcatcagggctacataaaggggaaatttgcagaccagactagaggaggaagtcagtccagaggcccattgacatgatgagttaaagaggttctggatagatggaatataggcgggaagatctgccctgaaacaagaaagagggtgcagtgtgccaagttgcccatggttccctctctttccttcaaattatggtgaagcggttaagttcataaattggattacagctagaagagtttctgccatgcctggaatggagttaaaagtgaagagggcagggagtgatgtttcaagaattcccctagaaaggaaatctaggaaccaagcccttccttggaacaaaaacaggaaaaacacatgtacatttaagcatatttttcttggatctctttctaacttgtacctacagccagtagattgttctaactcgggctgttaggtgtttctaattggccctgggcttccatccaggccagttagactcctctacgatcccattccctccctccccgtctctactccctacccccattgctgctgctgctcacgtcctctgtccacagagctactcagtttgtcagttctcgaaccactgcattactgtctctgtgcccgggtcctcgttttgtgtgctaccaatgactatcaagcagaaaggagaacagctacaggctaaagcactgaacaagaggattcaagggcagcggtgtgaatatgaaactcaaggcgctcccaccgatcacgggaggagcctgagattccaaatttctcacaagaaccatgtaatgtcagttgtgggtcagagctgtagaagctctaatgggaaggagaagcattaatagaaggacctgctgaagagcagggctttgggaagctccaggggagtgaggtgttgcctgcgtgagctccatacattgactctatttgttgcattttcaatggaaaaaaaaccagtgtgttcaacagctttggaaattagaagacttaaaataaagtgaagcgacaagaaacaatgtagcaacttaggatctcctaacaccactgtagccaaaatattaaagatcagaaaacaaataagagtgtctggaagttttctattgatacagaaaaaagtgccacaaacttggtggctaaagagatatttattatgtcacagatctgtagactagaagtctacagatccttcacttggaatctcaacagactgactgcaagtgtccactgggctgttactcatctgagctccaagcaccaccaagatggcttttgtagcagaagtgactttgcctgagtgttctcccttggttctgccctcacctgcctttgctgggcagtttgacagacattaaagccttcccatccactcccctatctccaactaccatggtaacatttgacatacataaggaagtatcccccaacatcccaacacaagcatcttaaatgcagaaatacaagaaatcaactagcaaattgtgagatttcagctagggaacgttctgcaacagtacacaaatcacacatttccaacaagacaaagagagagagggagaaacaaggaaaagctatcagtgccatctggtggaaagacctgtattaaaatgtccaaggtgatctggccacacccggaccatttcagacctctaaatcctcagacaacacaaccagtagattccagggcagtgtcagcattagtctatgggggatgtgtctggttaggagcaactgtgttgcgactgttcacatcctgtacatggccagtggtaaagcaatttatatgtcatctctacgtccaaatactgtataaacttttacctccaacacacacacacacacacacacacacactctttttctttttttttttttttttttttttttttttttggtttttcaaaacagggtttctctgtgactttggagtccgtcctggaactagctcttgtagaccaggctggtctcgaactaacagatccgcctgcctctgcctcccgagtgctgggattaaaggcatgcgccaccaatgcccgacaatctttacccaaactactctagtaggttactctacacatttgtagttccccagatgtgaaaattttgcattaacctctcacaaaacccattcataacacaattgctcttagtgttacctttcccttctgcttttattttcattcttgtatttattggaaattcatcctcttctttccttcaaataatactttcatctacattagttgctgatttctgattaaacaatttctgattaaacaataagtactaattaactcagtttctctgtgaaaggaattcagaacagggttggctagatgggtctgagccaggtagtccatgagattacaatcgagatgctgtacaagccacctaaagtcctgaccagggctgaggaagatccacttcttgaatggttaactcactggcttgactaccagtcagaggcttccggtcctcctcccagaagtctccccaagtccttacaatatggcagcttagctctccacagatttcccttgacacatctccctcccaacaaaaataaggaaaaaagacaagatttttgtggccaaacctaggaagttatagactcccatttcaacaacagcctactgcctacaaaagccagccctaacattgtagaaaagaactaccctagacatgagatgcccattgggggtatgttggaagttgtcttccacacaggctcttcttcatgagttcaatttccagatctttgggttctggtataaagtttgcttgtaggggaagctgtagccacgccttcttaggggctggctacaggtatgcctgaccatgcttgtgagggcgtggtcagagtgacgtagttggactgcgtttgagctttcggtttctctttgcttcttgctggacagaccactaccacgccggctggctaggttgctctgtaagtaaggcttttccctattaaatacccttatatttctacctgactccgtattggtaatttcccactatatttgctaacacaaaggaaactcagaacatttcagacacagactgtagttcaagtggtcctctgctttgataggacacagggtcataactggaggaagcaagtgtctgagcataccttcacctccttgccagtcaggaaacttgtggtggtttcagtgagacttgttccatatgctcataggtttgaacacttggttcccagaaggtggaactatttgagaaggatttaggatgtatggccttgttggaggaggtgagtcactgagggaaggctttgaggtttccaatggccacactgagacccatccccaacccccacctgctactacactcaggagagcaggccctgcacctcaccagggcagcacaatagagccaacactgttagcacaggtgcaggagaggcagccccaaagtcgtaagcatgggagagctgtccccattttacatctggcaggccaactctacaactgcccaggctcagaaccaaggtaatgagttggcccatcccatcatccaccctatgatctgctggggcactcaaagagacctgacctgcaggcccaaagctgaaggacctccacagcacagggcaacaacaggattatccaggaggagacctaacgaggacccagcatcaatagggcagcagaaaccagaagcctagagccagaccaatgactctctgcaatggacaaagtagagccagaccaatgactctctgcaatggacaaagtagagccagaccaatgactctctgcaatggacaaagtagagccagaccaatgactctctgcaatggacaaagtagagccagaccaatgactctctgcaatggacaaagggttcacattgtgactcactgtgtcacactgcagttcagcttccacgatgagatttctaagtttttccatttttttctttccttttttctcttaaattttgttttatttggagggtgtgctggggcggaaagcaatgaatgggatcaagatacatgatgtaaaagacacatagaataaataaatacatacatacataagcccatgccattcccagtctctctccctccctctccctccctctctcagtccgcctcaacttctactgaatgagatgtgagctctcagctactaccccagggctatgtctgcatgtccacctgcctggtgccatgttccccaccataacagtaatgaactctgaccctctggaaccattgtaagccccaaattaaaccttttattttataagttatctttgccatgatgtcttagcatagaaaactaaaacaggcatgcacatgcatgtgcacacacatgcgtgtgcacacacatgcccacacatgcgcgcgcgcgcgcgcgcgcgcgcgcacacacacacaagaattaagtcaaaacatcattatcatctagaggatgggtggttaggtcatgctaaaaccattccattgagcttatgaaagggcagagaacgaaatggaaaaggaagcaagcccatctttagaaactctagtggttccaatccaagctttcccccacccctgctgacttctctcatgcttgttatgttcattgcacaattagcttttgactgtacattatctgatcgtcagataatgacaattgctttgatgagcagtttagtagttattacatgttctgggaataattatatctgtgtctcaatgccccccaagtatgtcatacattccttgaagtagaaaaattactaaagcttattgctccccaaaaacatgtccctcagcacatacatacccacatactaccaatatgtgagcatataatagggaccgtgcccataaagaccaagaaatatggccccttcacaaaaatagtaattaaatggagaatcgctttctaaagggagagacaggaaaagggaggtctataagatggagattcatcttgcaaaagagggagatgaaagggtgactgagagatggaaaaggattgcaatgctttgtatgaaaatgtcaaaaaggaaaaaaaaacttctgcagaaaataaaagcataaactcaacaaatagtcaaattagtatgaaaacatgttctttaactgtatatacacatgtaaaaattcactgaagtgcatatgcatgtcatgtttttttttgcctgtcatgttttagtgtgtgaattatattgcacttttaaaaaatgaagttttaaaagaagtttcacataacatccaacacagtcctcatgcaattaaaaaaaaatccacaaacacctggagactcatagtgtcttggtgtttgtcttgcctaagtaatctgcttatttttttcacccatatccttaagattttgaacaccatgttcaggctccaattagaatgaaaagattcaacaaatcagtcttggttccaatgaaaccaggatacctgggctcaacaaagtaactccatagtgggaggtgagagacacagagcctaaaccctcgtgaggcccagacaatcctaaacagactgaaggattctgtcaggattgtgtaaggggctgacatggttagttagtggcaggacacctagccagaactagcctgaggcttttatacagacacactcagccaaaacagaaaattaaatgagatccctggcattggggtacagctgagacaggaactctgagcccttccctccctggaaggagagacagatgagcagacaaaggagagggagccaacttgtgtgggaatggcaactgtgctttttgccttacagagacccacaggagagagaacgtgcacactgctacagttcaggaccttgagagacagaagaatctgtctcccccaaaactctttttcccactggagaagacaggcttggagctcgatagatagcaaggagataagggaccggcaaggagatgtgtgggaagttcttccctgacaagtaaaaggaacagagggacagagaaggcaaaggatctgagaagcaatgagctcacaaggacagctcctgaagtgttaattccagaggcagcccagtcctgataacctgaagatggtcacctgagagaagctgagtatggtgaccgtggctcacaggccacacaactcaggaggagaactgggcagctaggaagacggagaactctgggagaaatggcagggccagctggaaggtctttcatcggactctaatgcaaggggaaacctggcaggagactgctctcctgaaacgtgggagagcagttgaatgcacaggcggtccacctgggggaagaagaacttagattttgctgaagccacgggataactttgcatcataggcagaaatgaagatattctggggatacttgtgtccctccctcgggctgtccaattgctgaaacaatggactccaggatactggaatttcccccaggagtctcaagctgggcaaggaaaaggctgggagggagcctgatgtctgctagatggggaacgtatctcccagaaagattccacaagtcctgacaacccgtctcctcatatgagagactaaagaagagagtatggcgatgggcaggactacaccttgaccaggaatactcaggtttgcataactctttccctgaacttaaacccaaacctcacgcctagacatcaaaggtagactggggggggctcttttttccacttactaatgcagcaccctgaataagcctcccctgctttcactttaactggcccgttgaggacaagtagccaagcctggctgattatagttgtctccctagattctcaccctaatgactctagctagtaacaagagagacaagttcatctttatggccaggtgctgtgggcttaggtcagtgtgcccaacttctctcggcctctggttgctggtgtacaaaaaggatacaaaaatactctccacattttgttatttgagaaagcatacaacacagacagggcctggcacagcgctaacaattcccataattactggtagtcagattcacggtacctcgttcagtagacagcacgcagtaccctgaacccgggtgagatactgctcaagaataacactgataaactctgtctgaccaggctagagtgactgggggagcaggaccttgaataaggagatgtctgaactgtgaataaaattttttaaatacccagggctttaaacaagatggtgtttggaaaggtgtgaggatggttgagtgatggaaatgccatttcctgtttgactataggaaagtgttgtgctgttgacgattcttaacctcctctgtgtctcagtcttctcatctctaaaagggggctgctttcatcaactatcttgtgccaattcgctaacatattaagagtgcttgcacgagtacataccacaaagcaaacgctcagttattgctagctgttatgttgttgactgtaattaccatattaccctgagcgacatttcaaggtgccacatgtcagaatcccccctctccccgagccacgcccttttttaacagtcccagcaatagtaaatgataattgcctgggacacaggaatcccctcttactagaagaacccaagaagacacccacagtgactgcttggacattagggagattacccacccacgcctgcgtgaccaggcggaagcagctttgtcaccaactcaaacccctgtgcataaacagtgaaggggagactaggcccttaagagtgagtgacagggcagctggcccgccgtgcagtaactacaacacaccaccagggagcagcagagcccagccctaggtggttttgtctacaggagcaattaatttgttccaggtttccttcgtgtatccgctcccggctgcaatcaccgagcttgttgttgatcatccaacctatcaacgagggtcctgctccggatcagcgggaccagcgggcccgcagagctcggctcgtctaggagccgtcttagccccgcccccgcggctcggccaaccctgggtggagaggagcgtcacaggggcgggtccggggaccacgtggcccgctaagggggtgaccgggtcgcgagggcggaataggcaaagctggcctcgccctgagtgccctcccccccgcgatgggcgtgcagccccccaacttctcctgggtgctcccgggccggctggccgggctggcgctgccgcggcaccccgcgcactaccagttcctgctggacctgggcgtgcggcacctggtgtccctaacggagcgcggcccccctcacagcgacagctgtccgggcctcacgctgcaccgaatccacatccctgacttttgcccgccggccccggaacagatcgaccaatttgtgaagatcgtggacgaggccaacgcccgcggagaggtcagcgcgctcgcctaggccgaagcgaaagggcggagcctggacggaaatgagtgggcggggcgggggtggagtcagaaaggagagggcgaggctgtgggcggggcctggtgggacccggctgggctggagctagatgaaacccacccatcctctgactagagtcagctctgctgctagaagagagggaggctaggtgatgccaagcaggctggagagagtactgtcaagtgaaatgcttccaggagtcggcggagcgccgaagccagatggaagtggttcaaaacccattttctagaggtccatatgtcatggagacacacttgtaactttaaattttactagcagctacgtttcataaagagatgaaacgaaacaggtggagttaattttgctactaatccaataagtcaaaaatattatttcaacatggaatcaatatgaaataaattattagtgaggcatttgcagtcttttccgtgccacatcttcagagcctggtaaatattttacacccaagctcaatttggactgacacatttcaggtaaaaaataccacaagtggctgggtgttctgtaacagacagcacagatagagggggcaggagatgcaggctgagagcccaacttgggaaccagccacttctgaggcctccatgtcaccagaagcaaggacagtcctcaacagtgttgctgtcacttgccctctgagggcctgagatttgtggggagaacagcacctttcggtgggaacaggagactgttggggagggcattggactccactccatgggtttcctcttcacaggctgtcggagtgcactgtgccctgggctttggccgcaccggcaccatgctggcctgctacctggtgaaggagcagggcttggatgcaggggatgccattgctgagattcggcgcctgcggccgggatccattgagacctatgaacaagagaaagctgtctttcagttctaccagcgaacaaaataaggaactcgacagctccccctgtctgctgctgcttgtggaaaatgtggccagggaggatggaaagtggacttaagttctacagccttcagctccctttgcctcctattggacagaagtagtatttccccgaagccataacctgattgacaggatggctgagaccccatgaatataagttaataactaataagaactcatttgcactgcatggcgttacacagcactcccagtacatcaactccatgtaagccctgggttgtagaaaagataaaagccatttctgttctttgaatgaggtggctagagctcatggtcacagttctggaaaacagaaggatgggccaggactgcaacacacgcttttgtctccttgaagatgttgaaattctaggtgctgttccctaaacgtatgtgatatggtttctagagaacgggttagtgaaagagatccgtgtctctggccacccagctccgagcagcctcggggctctacactcccacaccaggagtgtccttgttgatatcaccccttatgtaggctcatctgctcccacttgggtcacctttgttcttctcagggtacagaagacttgggtgtcacagatgtctctcttctccccccttcctctccccctccccctccttctctctccccctcttcccctcttaccagcctcaggtgtacccagctcatttgttacctccagcctctgtgtcatccccagcctcaagccaaggaatgcctgaactgagtcttggtggttatatagagtggatattaagtaatcaaataaataactctgggctgtgactcttggccatgtttcttgggttttgtcttcttcacgtctcccctgtagggctccattctgccattggcaccacactttggagatgagatgaatgtcatacatgagcccagtggactctcttataatgtcagtctgaatttttgccctgtcttctgccataacaggctgaactgaagaagggagatccaccctgagatatacatcgagtgcctgtgtgaactaggtgctgtcagaggtggaggcgactcagcaaaataaaacatgattcctactctcaggagaagataggtagtgacagtccattcccacatgacagatgctaaaggccatttctactattgcaggctcagcacagaatagtcaagaattcccctatagcctccatctcttgtattgaagaccagagcttcgcctatgccatcccctccccaggacttctctccccgtcctctgctggccctaactaaacattatccagctcacccttccacaaaaggcttagttaaacaaggaatgtaaggtgccctcacctagaatcctttttgtgtcaaacgggggaggtccattccttagctacttccttggatcctatctagccctcccaggggaatatcagccaaagagaagaaacgcaaaaagtccaggcactcaggctgtgacggggaaggaggaagtatataccacgtgaaaccctggccttcccatcaccaaaagctccatgccccctgccactggaacgcctgcccatgatgcaaaccagaccatcccccaagggagtgtgcatgtctgtgtaatgttttcctgaggagggcatggcccaggaagagagtggaaggtgcatttcctcagctcctgcggttcattgtcagagcttacccctatggtaagctgaagctgccccggagtgtgtctcctcaccagcactgatcagctggaccatgtgaccggtccttggcctctctgtcatctgttcctccccatatcctctgcactgccagagcagagtctgctcttcctccccaggctcctttgaaggagacagaaaatttttctaaccccattaaagccctgtgtgcagttccctccccataatttaagcaagtctcctctgcctcaagagttccttagggaaataaacatataattatgtgcttaaggaaatcgcttttaaataagtaagagttgacttcaaatgaaaaactctgcccttctccttctacctaccttgaggggttagcctggagctcttttatgtcccagaattctaaccttcctaccaccctttctctggtattttttcctgctcatttatggtccaggatttttaccgtcccactttcctctctccagtacttgtcaccaaggaaaggtcacacattagccatgccccatgcccagtacatcctacactggtgccaggagcacacctgagaatatatttacatttgcaccagcccagagtttcatatgcttaacaactcctgacgtttctgaactggaactgaatagttggggggaggggactctataccgaaggatatttagcagtgcccctggtttgtactcactagatgacagtcacacactcctctagttatgacaaccagagatgcctctagacattgccacatattccccgtgggaacaaaacctgccccaatgagagcccctgcaacaaccaacatgcaggttccattctctctggaagtagaggaacagatttggggtcttatgtatatgtacatatagggtacaaagaccaactcacatattgacacttttccaaccagtgtctgcaagtcaagttattcctgggttctcaactgtagatggaggtttctgtccagcctggtccctaagccctttagtcccaaataaacacacagaaacttaggttaatcatgaactgtttggctggtggctcaggcttcttattgactagctctgtcttaattatgaacccatttctattaatctgtgtatctccacatggtcttagcttaccagtgatgtgcagatatatatcttccctggcagctacatggtgtgtctctcaagactcactctctgtgttcctcctcccagaattctcctagtctggtagcccagcatggctacatcctgtctgcccattggccaaaacagctttattcatcaatcattaagagaaacatatattcacggcatgcagaaggacatcccccatcactcaactctccgaaggcttgccttccagcaaggtcataagcactactgactctctacattcagaaggattatattcccaatgaactgctgatgggcgtggctgaaacagcttctgccacctgttctagtttggtttctgttcctggaataaacctggctgtcttagttagggtttctattgttgtgaagagacacaatgaccacagcgaactcttataaaggaaagcatttaattggggctggcttacagttcagaagtttagttcattatcatcatggcaggaagcatgacagcatgtaggcagacatagtacaggagaggtagctgagagctctacctctgggtctgaaggcagcaggaagagagagcagacgctgggcctggcttgagcttctgaaatcccaaagcccacccccagtgacacacttcctccaacaaggtcatacctactccaacaaggccacatctcctgacagcacctctccctgtgggcctatgagggctattttcattcaaaacaccacaataatcaaacacaacttgagaaggaaagggtttgcctcgttgtgttaattagggcttctattgctgtaatgaaacaccataaccaaaaagcaagttggggaggaaagggtttatttggcttatactcccacatccttattcattattgaagaaagtcaggacaggaactcaaacagggcagaatccaggaggcaggagctgatgcagaggccactgaggggacctgcttactggcttgcttccctggcttgctcaacctgctttcttatagaacccaggaccaccaggccagggatggcaccacccaccatgggctgggccctcccccattgatgactaattgagaaaatgcctttcagccggatctcatggaggcatttcctcactgaggctccttcctctctgatgactctaacctgtgtcaagttgacacacaaaatcagccagcacaatcaaggaagacaaggcaggaactggaggcaggaactgaagcaggggccatgaaggaacacttcgtatggaattgccctctgtagctttctcaacccacttcattcattcattcattcattcattcattaaccttttattgatttttttgtggatttcacgtcatgcatcacgatcctattctctccccatctcttctgccctctgcccttgcaacctctcccaaaaaaataaaatttaaaagaaaaacgaaaagcaaaagaaaaaaacgtctctgtgtagaggctgtaatgtgacacagtgagccacagggtaaaccctttaatccacacaccttcacttgcaagtgctcgttgcaatgagtcattagtctagtttgaggcatctggcttctgcaacactatcaacactagaccctcactgggactgctcttggatatcctgttgtcgccttgtgttgtggagatacagcagcttcggatctgcaggtctggccccttcacatgttccagcagttcataggtaacatggatgctggagtgagctaactcatagcccaggttctgggcctgggtggtggtagctaggctggtcagcccaacagccagggtgagctctccagcactgccctggctatctctcacccagtgcaacaggcagcaaaaagcaggggcaattaggcagctctcatgccctcacctgcacccataccaccagggccagctctcctgtttagcccaggcccactcttccgaatgctgcaattgatgaggggtagagtgagctctcctgctctcatccccctcctgaggccagctctcttgcctgctgcaggggcagagggaggggtgggtgagggcatctttccctcatccatgccaccacatggcagactagaggggacagagtcagctctcctgctctcacaccctcagggtggctcacatgtccccactgatagatctagtatgctacctgggtgagatgcagtgcccactctcttgagtgcggcacctggtaagaggcttggacagttcacccagtcttgtgacctcagggccagctcacctgcctgggcaaggggcaaggaggagtgtcagtctgctttcttacacaacccaggacaacctgcccagggagacactgcccacattgggctgagctctcccatatcaatcagaaatcaagaaaatgcccccacagacatgtccgcaggccaatccaatggaggcagtttctccactgagtctcactcttcctaagtagacaaaaagtaacagcattgcccctgtgttttgtaaaggtcattcctgtttattcccaggtacctgacagggctctgctgaatagaggatttttcttcttggaaacttttgttccatgctatcttggctctgcactggccacttgggcccatccctgggaacgttgttcagatgcaggaacagcttgcatcaagacagagggaaaccaaccacagtttatttgagaagatttctccctacctgctggcattgcccttgcaggatgcccaagacagtgcacaggacaaacctactcctgctcccacatcatacagcccaagatcaagatgtcaggagtgctggttttgatgcacccatacccttgtgctctctgagttctgggtcccaagatggcttgaaaggtcgtgtatctcagtttaatgatgcagaaggaactacagtgaggtcataggccctcatctgcatgccggtgagcctgtccacagttcctgtggagtgcccattcctctcccatctgcccctctcagcctaccctaacatatagcggcaccttacaaagggcagttcgctgttgatccccctctgctgaggaggtctgctcctctgaacatgctcccacctgcacaacattaaccccaaagtcggttctccctggggaaatgatgggcatactctctgtgacagagaatcatctaaaccatatagcctttctcagcatgaactgcgcccatttgccaaccttcaagtcaaagctcctgctatctatgacttaccattctttctgagagggaaactaatttggtctcacaggaatttttgtcacaaaacaatgacagtcaccactaatgcatttcacagtttgtcatacccgtactttgcttgcttatataagcataattgccgtcatttatgaaacaccatgtagctggtggtttacataccctgctttatgtaattttatcattacaaccctgcaagtcaagtgattgctccttcctatagacggaatcaagacacagaaaggtgaatagtgtgccaaaaaaaatcacacttgtcgtagttacttttcccattattgagactgctgtcctgtccggagtcaacttaaaggaggaagggtttgctttggcttacagttcaaagggttacagtccatcagccatgttgagagaaagcataacagcaagagtgtaaagcggctgggaactgagagaggatgtgaagtagggcttggctgctgaacttcaagccccacccctatggactcacttcctccagttaagctctgcctcctaaaggctctacaaccttcccagctgcggatcaagtgttcaaacacataggcttatgagtgggtgtgggatcagagagaggcatctcacatttaaaccatccacaccaaagaaactggggtataaatccaagtcatcttcatcacctccaaagtctaaagcttgtgtttctttcaccaaacaccctcctgacaagacttaccatatgattctagggacatgatagagtctgtctgcatttcagtgctcaatgttaccacatgtccccaaggacccatttcttcctcctcagaagccagagaataatcctgcacctaaacctgaagtcaattgcaccagaattatgtgctatgctttaccatgtggcctggggccagaaggatttctcagtgctgacaacctgagttcaattccctaggcccacaaagtgaaaggagagaacctgctcccacacattgtcctctgtcctacacacacgcacacacacacacacacacacacacacacacacacacacacacacactaaaattttagctgcgattataaactaaaaatcaagtgtagccttggacaaagtaacagaaaagtagttctgtcagatccattattctctaacatgcatgcagatgtcctcactgggaacgacagtcctgaggcttgtgtggctggcgtggagccctcaaaaatgtctttttatgtttgataatttattgaaaatccttctgctctttatggttttgttgtttgaccccttaatgtatgccaggcactgtgccaagggctttgcagacattatctcattcgctcttctaaaagaaatggtataaaatctgatgcacaaagcactaccacagtaaccaatccacgattacagtagtacccagagacttgagtattgtgccccgagtcacgccatagaacaagatggaagcctggagttggcaattaacccaccttcccttccatagagcagagaagggaggttgtaattaagaaatagaattatcttgctcagaattgagtcttttggtctcccagggccatcggtggagccctctgatcacagggtttcaagggcactgtcattcatctattgtccacactgtcccagcatcgtttctaacagccttctgcctaaagcatcaaaactggagtcccctgttgattgaaaacttatttacataagcacatgccccatgatatcctacatttctctagctattaaagattcaaggcacacttttaagaaggcagcatgcttgtccaagcaaacagaaatttgaaaaacactttggtgcacacccatgcctgaaactgatgccttatttgccgccttgataactgagtcctttgtgccaataaattgcttaaattactgcaaccaccccctcgccctatttctcccttgacttattctgccaccatggatatgtgatcacggaacaaattagtaataccacctctgaattttcagtgtgtggcactgaaaacgaatgataaacagctctgggatttccccccctccggcttgtataatgaccacactcatcttcattactaacgtacacagagtaatgactgttgtgaatccgaggtggcctttgggaaatggcaatggctgcagatatctgctggtcatttcggatacattgtatatgccattgctcctccttacccccaccccaagaaaactcattgatttccatgttttctgatggtatcacatcttcccagtgatgggtgagaccacactgggatccaccccacagacagaaccctgcgaatcctgttcacaattcataaagatctaaaacatccaactattttatggaagttagagaatgcagattaaaatctgagagtagggaaaagttcataggacagagtccaggagagactagacacacatttccagttgtcctctcccaggagagtcacatgggcacacttctcctagcaacaatgagtagaaaaacatacaaagtattgccaaccacagatgctcccttgaactttggtgagcagagttttattgggggtcagtcacgcatgcatgcagcatggaaatgactgaccttagactcagtttccagccccagcaggggccaaattgaagcagcatggtccatagcaacttagatataagtaaacaggtgttcaccataagtcacattgttgacatggatcagctggccagcctgaggtctcagctatacagaaatactcttatcatgcagagtattccaaaggtttgttgtccatctcacaggagctaagcaaggaagggactgaagacctttgggatgtgtgtactgggcatccccagcctgctgggttaactttaactgcacaccaccagatacttagtgtattagttacttttctgttgctgtataaaataccatgaccaaaggcaacttaaggtcgggacaggtttatcttggcttacagttgcagaggtatagagtccatagtggtgcagaaagcataacagcagaaagatggctaatcacattcatccacacatgggaaacagagaccagaaagtgaagcaaagctccaatgctcaaagcccaacaccagtgatgtacttcctccagcaaggctgtaccttccaaaagttccataactctccccaagcagtaccaccagctggagtcaggtgttcaagtacatgagcctatgggggacattttttggtcaaaccccacacttggggttctctccatttgataatctgggcagctgttgcttcactctaactaacccccagcagtctctgttttacccatcactctttagagaaaggttcccaacacccatgtccacactcccaaagcatctgcccttatttacctatgatgagtcagccattcaatagcttcatctctctctctctctctctctctctctctctctctctctctctctctgtgtgtgtgtgtgtgtgtgtgtgtgtgtgtgtgtctgtctgtctgtctgtctgtctgtctgtctgtctgtctccaccagaaactaaggatgtctttgcccatacttctaacatctggcaggatgcccatcacatagctgtacaattagcatagagtaacaaattaaccaataggctgtcatgttaatgaaagaaagaaaagaattaatttaggggatagataatttagtgaaggaatgcacaacacaggtactcttaagtatcagcacaaaaaatggaaatatgtagcacatcaatacttaggcaatggtatagctattggaaatataagaagagtaagtctgctaaagaaaaaaaatattttaattcaatctttcaaagagatgtggttggataacctgaagagacatacaggtgttgaatgttattaaacatactaaggccatgtgctaagtgcaaagtccattcagagaggctcggatgaggtagagcagggtgttgggtgtcctcgagggaaggaaagaaaaaaggcatctaaaggcatggaagaagtaaaatccccaacccgtgggaagtagagggttcgtggtcaggttaagattgtacgagaaccatatgtggattttaaacatagagtaagggattaccatcctacaaccacactgccagagaaactagtaaacaaagaagaccctaaaagagacaaactttgtcccctggagaaggggaaaaggtcaccatcccctgagcaaattgagaacatgggaagaggggggaggaagctacgagagtgagaagggaagaaaaggaaggatgcagaggtcatgagggagcagaaattttgagtcaggtgtagattagaagaaaggacatatgacaggtaggattttagttgggggatggtagaggaggaagggagggagaagggaactgggattgtcatgtaattcaatcttgtttctaattcaaatataaaaaataaaagataaaagataaaaaaaagagttggtacagaaaaaaaaaaagattgtacgagaacagcagaaattcttgccacaggaggggtccccatctgatccacggtgtggacgcaccacaggattctgagccgaggacatgtcattgggcttcatttttcttaaaagttacgttctaacagaatggccccataaccaagtagctgtgcggtgctttacgattttaacattgtcaaaaagagatgaggtcgcaccgctcgctgctggtttctaagacttctcagaaggtaaaagttaagtaagaacctgctttcccctcttgctggaagttaatgactgtaatgctttgcagaaggaagtggaagggttgttaagtccctgtgctcgccctctgggtttctgggttatgattttttaatgctttcaaatggaaagaatgtcatccctgtgtgctggaaatacgcctttctcgtggcagctggcttaggcttctgcatacccactgctctgctggattctctggagtcacactttcgatcacactgtggccatagtccagttaagtttcacatgttctagggagcagtgggccctggtgcttcactctggccagcatgctgctatttctccctgttgcccaacggccaagaggactcctgaacattccagccttctgcctcagttgtcctccacactcaccaaccctgctgttacatctgacccttaattcaagcctgttttctcctctaaataatggacaatgtgtcacttcagggagacagacagacagggtggtatatttttctgcaggtggacgaggcaacctgaagactccaaagaatatgagaatatgcagggctcctagaggagtccactagctgcaaatgcaagaacacctggatctaggacccttgttcctggcactcttcagctgggaacctagaaatggcagcataggcacctgttggagccctgtccatgagtatctggcagctagaccactgggtggcctgggtccccctgctgaattcttccatcctgtgggatcccaggtctctcctagcacatgtgtgcaagagcctgtagggaaaaggaaggccaggggcctgcgattccactgaggagtcaggccccagccttgggagcaacccccacccctcctcaaccctcttctgctcatttgataaactggaagacacagaagatgtcaaggggaataccggatgaggctatcaaaatgacttaataaaatacaaattaaaacaacaattatatgatttcatatacagcagtgctggacatgcacccagtctcaaactaaatctggcaaagctgggggaaatccaaactctcaagtttctgatgaaagtgaattcaccccaaaacccagcatatataaatgcgtatacatactcagccactacatacatatttatggacaaacttcatttgtgcaacttagagacacatgtgaggctattcatttactcatttactcagtccttatttactggacgcttgttatatgccagacacaattccaggaacttaaaaattgagcatgaccaaaacccaaaaaatatctgccttggcaacgtgtatatttaccagtgtttaaatggtcccaaactgtaaacaacctaaaagacattcttagcagagtgggtgagccaagccctgccatactgaagcaacgatgtgtcccagaatccatgttgggtgggccggaaagaaacttgtgcaccactagacacagaataaagacagtcctgtacattgcttatggagacacacaaataaaaataagttatttggagacccaccaaactcggaatcttagctgaacccggtaaagaggaagggaaagcatcagcgaagttatgttgtttcttaaacatctacaacaaaatgacatgtgaggttagccctgtatgtatttgtattgcatgctatgcccatagatgtttattttatcaatgtgggtctattttccttcaagatgggtacatttttgcttttataattattgttgtgtttgattaggcccccattctaggccatccacaaactggacccaccctgtgcactgccggacatttctaaatggaaagcaagaggctgcccaggcaaagtacctgacgccccctggcggcacagacgagatccgaagttagtaagggtgcgaggggaggtgaaatttggagctggtatagccctttaaagaacaatctgccactatctagcacagttggggagacaaggcctatttattattctggaatgctgtttttaaaggtttgccctagagaaatgtaagcacaaactcaaggaaatgtgtgcaaacgtctttgcagcattgtccacggcagccaaaaactgaaaagggcaccattagccaccattaggaaaacaggtgagttagacatccacacccaatgaaaccctctaccacagtaaatgacgatggaaaaccacctcatgcgtcagtcacatctcacatatccagcctgttggggacccttgctagactgaggttcagtctaccatgtccagacagctctcaagagctctggccgcaagatggtgcaaaatgggaggtctcccttcccccacccccggatgggcttcctactctctgcctgaccttatttggagactgaccctgagcctggatacctgatttacctcaggcatgacacctgacacagttcccggcagatgctcactccctgcacagaagcacacagggtagttaggctttgtgctttggctgttaaggtgaattaggtgatgccctagcctctgtccccatcctgtctatctcccctcactctgtctcactgaagctatctcctggagggctgtttctgccatactcacaagctgtgcaaagccttgagtgctgcccctgccccctttgtcctcgaggcctggtggcccactgaccatgaggagaccccacaacaacagatgctgaggaaaaggaggagccttggagtcttccctctccaacgtaccaattacaggaaactgcaggtaagccaaacaccactgtgggtgggcaacacgcatgtcgtgattgcaagaccagatgagaagaataaataccagatgcaggagtggagaaccacatgggtccttggctgaatcacaggactttatttctttaagagaagggggaaaaaaaaaggttcactcctgtaactccagaactcaggaggcagagaggtcgactgggaaactgaggccagcctgggctaccttgtaaaaatggtcaagaaagaagggaggcaagtaaggaaagagcaagaaagaattacccaaagtaaatgtgaccaaaatttacaattaaatagtgctgggtggtggatgactagacacttcttgaattcatctactttttattatctaatattttaatttattgtttgttgtgtttgattcgtttgtggaggaagagatggtagatgggggtgggggagacccatataaatgagtgctagaggaagttttcaatgatggcttaagagacaagagaccagatgcagccaggcagttggtgcacgcctttagtcccagcactcaggaggcagaggcagggagatctctgtgagttcaaagccagcctggtctacagagctagttccatgacagctagggctgttatacctagaaaccctgtctgggaagagagagagagagagagagagagagagagagagagagagagagagagagacctggagacaagcatgtagcctcagggaggaaggaagcagtgctgcaggatattgtaaagggaatggggggaggcattattctcagtgtaatggagagaccttggggcttaagcagaggaccccttatatcagtctgttcgtctatgagtgggtcactattccgtgtataaagtgggagggagcagactaagtaagatcagggatgagaggacatacaaagatgtctttatagtaatgggtgcaaaagactggaaccccagtcgcagtgcctagaaatgtatctgtggtatactttgaagaggaatagatggaacttggccaaagatctgatgtgaggcttgtctggggttttatttaagcagtaggcagggaggccctgagatgagaaaaatcatgggagttgaagaggggcagtaaaaaaagggggctcgggacactgggtggttcctagaaaggagagaatgaagaatttcatctcgttgcttgtcaaccacaaaagtgctggcgattgtgtgcttggttcagaagtccatgggaaaggtcgagtagggtcaagaggtataaatttaggtgtcactggtgtattcttcaaaaccacgcaattaggcagacggtgtaaataaaaaaggaaggctgggaccaaacaccaagaccccctccatttaatagtcgggaaaagagaacccatgccaatagacttaacgaggtagaagaataaatgggggtgtcggggggcatgagacatgccaagccaagaatatgtttcaggttggaagccgtattcaactgttgaaaatgctgctgcataaccaaaaacaagagagcacaggctaggatcaccccctcccttggagctagcagtaccggagacaaaagcagttcagtggggtggggcctctgcaggggctgaggccagatggcccgtgattgacaagtgagtatgggagggccttttgagaagcctgactctgaggaaaggaggacaatgaggtgggcactggggacaaggacataaaggagaaggtgatttagggtgtttatccgaatccgtatgcagagggaaagaacccaggagagagggagtgaaggggacagtgaggggtgaatgcaagagggattggagaaagggaaggaaattggagtccaagcccacagttcacctgactgagctgggtgctaactctgttccatctgatccaggtcccaagccgttcccctgactctcattagctctggtaattgtttgctggctcatgggtgtcaccatctcccagggttcagtgtgctaaatcttccactgccatctcctctgaacacacaagtctcacggtcttcctcaccctatctaggctgtgcatctacccagggaactagagagggaaataagcaaactgaagaaaattaattctgatctattttatacattctgtataaatgcatgaaatagattatgtttgacagcggtaaacagagaagccaaaaaaatccaatttatcactttaattatatatgcttttcttcctcaatctccagagaagaataagcctccagcagtgttcagccccttctatgaagccattcccaaattattaatgctgctcttagtaaccgtgtggtcggagtgacagatgccctatgtgaagcacacaggcaacggttagcacgctacctgcatatgtgcgtatgtaaacaggggtgtacagggaacacaagtgaaaagtcaggaacatgcaatgtgagtcaaaggaactgcacagatgaaactgaagtccatcccaaacaggttctcttcttctctcctgaggaaagtgtaagggctctgagttatatggacactggtccaaccaacctttaggcagcagtctcaccccacaatctcctccccccccccccgcaacaatttagcagccatccacactgtccctatgcagaagcaggagcacaagaaggggactctatgttgcctattgttttgttttgttttggtgaatgcaaactctgccagacttggaagagcagcgaggaacaggacacacctggtcctcgccgtccggaaacaagtagccctgagaaaagaaacgaacacacaaggcggttgtaccacaagatgaaggtgccagctgctaaggcagggtacacgtgcacccagcacaggcagtagtcagaataggaagaggtctgtgtcaaatggggttctccagggggacagaacaaataaaacgaatatacattacaaaggggatttattagattataatgtgttagtgacaatattttcggtggctaatttgcactttgattaccatcaaaatcaagggctggatttctgacttgggaattggggtgagtggccctgttagctcacacaggaaatgccaggagagaacctggttaggagattattacttttctcagggtcgtgacaacatacaccacagaagccacttaaggaagggagggattgcttgggctcatggttgaagatccagtccattttggcagggaaaacatggctgcggaggcctgaggtagctgaccacacttgtatgtatactgcctctcctctcacttcctcaggctagacccaaggccctgggatggctctgtcaactttcagtgtggatcttctgtctccagctaatcagagacgcacccaaatggagatacatttccacagtgattctaaatccagtccagggattaagacgattaacctgggagagaaggaagggttcagtaggttgagtcaaatgcctgcatggagctctagagaagcagctggacacttggttagaccttgaactagaaagacatactggggattcgctgaaccatagacagtgatttaaatccgtggcacaggtgagaacacttgaagaacacaaaatggaaggaaaacaggcctgtgactatagtctgcccagctctttcaaaacctctaggggagggaggctgtgcctgcaggggatgatgggaaagttccacaagatgggagacaagtgaggatcaatcgtgtcttggttttaaagaagggagcaacaatcatcaggaacaatgttgaccttgaccttctctcaaacaacatgagatcaagcttgattactggatacactagagatgcgtgtgatccaggctagagacaggcaagctaggttaagtcgaatgggaaggcagcaagcacacctaagggtttcccaagcactttttgctctggggcacataaggctatctcttttgtgtgtgtgtgtgtgtgtgtgtgtgtgtgtgtgtgtgtgtgtgtgtgtgtctgtgtgtctgtgtgtctgtgtgtgtgtgtgtgtgtgtgtgtgtgtgtgtgtgtgtgtgtgtgtttgcctgtatgtttgtctgtacaccacatgcacgcagcacccacagaagccagaaaagggcattgggtcctctgaacctggaattagttacaaatgattataggctgtcatgtgggtgctgggaatagaatcaacgttctctggaagagtagccagtgctcatcactgataagccatctctctagccccaagattatctttaaatataacgtttaatgactgagcacatcggatcccagatagaaacatggccttacctaagtgttctaaggactgagaagatcagtatcttataagacccatagccatcggtggcaccctgatgcagaggggctataaatggattgtcacaagtgtgacaacggaggaagggcagctggcttgtctggagtggctttaaggtgaagaaaacatgagcatctttcaaaagcatctagtgaaaagatccagttgagatggcctgactgaattcatgggaggcaaaggtagagtatccttggtagtgtaaggctcctaagaaggcatacaagaatcgaattgcagaaggggacagggacagtgaaaatataagatattctgtatgcgaagtgtagttctcttagcacaacattaaaagctggatgtgattattgccacgataaaaatgttaaatctgaccttcagtgagggtaagccaccatctcaggtgctccacccactaagcagcttggccaagactttactacatctgtttctgtctccagcactcctaggcattgtactttgatgtatcttgaacctcacatctgtgctaggaatagagacacaaagaagaattggattccacacttgactttgaagagactgaacatgaaatagaggaagatgaaaaaaacagatgcaatcccatgtgataaacagaataatggggaaatgccttaagcagcacaaagactatattctaatatatgcccgtctttttctgagcgcaaggaggcaaagatggactgggaatagagaagagctttgagaaagtctgctggctggaaggattgttgaaaagacaggtggaaggagggcggggcaggtgtgtggttgaatgggtgggtgggtgaagagagaaattcttccctagggcaactgttgttcgggtggccacaagaggtcgctgcagacctgactcaaacacagtttcccattggcccttccaggttcagcctagctgcctcgaagggagggggacaggcagaaggaatcgcgggagtcggtcagattccaatctggctccttcctttaccttacctttacctttcagctcctatctatcctacgttctaaggttttaaaacacgtctccaatcctcctgtctttagaatctaactcagaaattggaggggaggcagggagtacggggactggggggagtctttcttagacctctgcttccagcaagccatgtggttccaatagcaggcaagctggaaaacccagtatctccactcaagttacttcatctttttggacctcccaagaagtgaagtttgcgaggaagtctcgtagttccaggctgcctggctcactcttcctttaacaatgatagccttcatcaattacttcctccttgtgtggcacggctctaatccggtgacaaccaagaaggcagtcagcagccacgtgtaacatttaatacagaattaactaaaataaaggcaaatgcaatttgtagttcctcagcctctccagccaatttcaaatatttgatagctacgatgcaactgagaactattgcaggaagcagccaggggacattttcagcatctcagagtgttccatgagacaacactatctacacacctcatgtttttatctcacttttagggtgaaatataattatttactcaccttagagataagaccctgagacccaaactgttgcaagcttagccaaggtctctcagcagattaagaatcaaagcaagggagctggagaaatagctcagtggttaagagcactggctgctcttccaaaggacctgggctcaattcccagcacacacatggtggctcataaccaactgtaactccattccccaggatctaatgccctcttctagccgtcaaaggtaatggcctgaatgcagtacacagacatacactcaggcacaaacaacagacacagaaaataaaataagacaagaatcaaagcaatgattcaagcttgagtggctgactccacacctagcccgctgccctgtgccaagagctgtcctagtgaccattctcctgagttcaccctctgacctcctgggagttaaactgacatttccaggctggtgagatggctcggccattaaaggctaggctcacaaccaaaaataaactgacatttcccagtccccacaaccattggccctcacagctgttgtcctgacagtgacctacgcaattaggcaccacttctggaagacagtctcctacctttctgtccagtcccctgcaggggcatctaacctgcagccaaggatatgaatatagcccaacacaaaagtataaacctactcaaaacatttgcaattttcttttcataactcaattgcaagttctcgggtggactttgttagtcatgctgcaatgtaagaaggtgtgatgggtttggagcctgactcatagcagtctccattcagtgtagcctaggtcctagaagatgtgtgacctgagcagatttgtaaccttactgctattctctcaagtcgccttcatctgtaagggcatgatgggcagcccgctgagctcagagagccaactcatccgcctctgaaggtacagaagcctgtcaccttcaggggtgacatgataagctgggattcacttcacactcacaatgacagtagatgaagccagagagatgctttgaccattctgtgttcacaacatccaggatgccctgtgtgtgaggccatttgtggttacccatcgccctgtctccttccctgtactgccctgccctgcccacttatcctttgctgaacaaagctgggaaaactctgatcaggagtctataggcaaagaatgacgaaggaaaacataggtgccctctgggtgagtgagcaagacactgtgctctatctcacctccttaccacttgaatactgaggcagcctggtgaccaagtcacttcctgtcagtgtcagatgggtgtcccatttccactgagtcacagaatctgtgtagagaacacaggaaactcacgctgtctgctcttgccttcagcaataagcacatagggatttttcccaaccacgtagaacttctcaggtagatcctcagaaagcctcactgccagaaaattccccctgctcttttaccagattcttccatctttcatctcaaagccgtgtgctctgttctgtcctcagagtcgatggagatctctgtgagggacctttgcgtcctttacaaataaagcttgcatgaacacactttgggtgtcttttgatacccatacatacacattctcaggaagacactgtgtcatcgcacattttagaaaatcctatcaggcccattcccaacatggtggaatctgttttggagcctatgcttcagcggtaaatcatggcagggtgcacaggatggtgcccgtttccacatggctgctgggaagcaaagagagaaataggaagagccctggctcacaatgccctttgaggacatgccctcaatgactgtagcctctcatattgaccccacctcttaaaacagacccaggaccaagcctttaatacatggatttttggagagtaatctagagccagactatagcaaggaaggacttcatcagactactggaggtctctcggagatggaagttggatgattggtggtttcaatattacactctcactcggagaggctgagactgaatttgaacagtcactcaagttttccaataatccacagctataacccatcctggttccctggcatgagccttgtgaaaccacagaacgatcttattagtgatttacctgactccttcatattttgtgttgaataaaatcaatatatatatatatatatatatatatatatatatatatccagagaggaaatgtcatttgagcttaccaaatttcttctccacttcatcttaggtcagaagtgccaccccaggtcaagaggactaattgctgtatcctcatttcggggtctgcctgatggctggcctgctctgtcttaggaaaggcaccatgctgctatggatggttctgctgctctttggtgagttactggcctccatgaaagtggtctccgagacacagttcctaactgctccttttgcagactcacagggagttagtgcctggagcttgagagaagtgtgtgcacactggcaagctgtgggaagctggtacagggtggaaacattctacagtggttcctagctcctttgccaaggttcttgacaaagtaggcccatcatcagaaataaactagagaggcagattctaagatcccaggatttcccaaggtcacttttaccctatgaaataatttggggactatcccaaaaggaaaaacagttactgaaggacaggagtcccatgggagtgtcagggggaagatcggagacagaggtgtaaattccatgcctgttgttcagctgcagaggtgagactcagaaagcaacatcacttttatgacaccttagcattctccaagaaccacttgctgaagacaagacttctcactgggtcaaaagccttgcacactggctatccaaagccctcctcaatcttgccttcctcttctgcctaccttgcctctctgtagggagtatggtgagctttgggatctaactggtcctcagcgctggtttgaagaaataacagtccatctctcccctcaccacttttccagccacattggccagccatattgtgactgatccatccaaaagtgaaagattgtggttcacagtgtctctgggccccctagattcagttcagtctcagctaattttatcctgctgtgccccaaagttacaacatacctacatacatacaatttccattgacagctttcttttgagggtaggaaaagaaagaaaaagtgtttctaatgctctatttgcttgtttgcatctttactgcttgttgtttatttcatggaacagaaaaagcaaaattattccaaactatgacctcttcctggacagtttgtaaaagctgaagcctgtgaggaaaaggcctgctctactttgtgctcttctctcttctatgccatagtgccactggccatcttggcaagtgaagaggtctaatgctcatactatcgaagaagcagggctacctgtgttgaacatactttagtggaaggttgccaaggggcaagttgaatgaccttgtgaaaggaacagcccctggggcttgtctggataaagtccaaggcatctgatttttgaatgcaagatctagatagcaaactgcaaagcctcaggggcggggatggaggtggggtggtgaactaatgaccagcttcctgccatgcagtagagtcgagaactagacacaagtagcccacacttgatgcctagagatcccagaaaagcatcctaagacacataccccaggggtgggcgtgtggtaacagttgcagtaagtgcacagctgctgtttcctctcagatgtggacagagagaaggagaagaaacacagaacaaaaccattgaatggctgctttgtagtatcaagccattagaattttctagagcaatttttttttaatccctattaaacaatggggagaccaaggctctcagaaaccttcctggagttaacaagagcaaaacagtaatgccaacacctatccatcagaggttgagtcctgtgttttccccaaacctccttcccaggaatccagaggcagaggcagaaggatctctgtgagttcgaggccagcctggtctacagagtgagttccagggcaggctccaaagctacatagaggaaccctgtctcaaaagtaaataaataaataggtaaactagaaaatagaaattcattttaaataatatgcaacatgtggtcatgataattgcaacaattagtaatttatcagttatcagtatctagaacgccagaggtcctggcatcaaacatgataggatatgcctcaacattaaatgtggaaaagtttgagggatggtccttagctttcttctgagccaaaacttagacaaattccctttcctagtggaacccacctctctccatacactcctctgcaccatggaagccatggcttgacaaagcagcatgctcctccacagaagggacccactgtgagatagttcttcaggttgagctaaatctgcctccctggtccctctaattttcaataattagtctcttttctggcctataaagtaactcacaataaatctttcccttctctgaaagaatgattgaaggccaccattgtgttcatgttctattgcatctttatagataagtatctcgcaaatccgtcaacattctgatagagatggtctccagacccatatgctctgttggtgtgctggaagctcaactttcttcttgctcccactatgaagcaagaagctcccagctgcttccaaggtttaggactctataattcaacttagtctgacaacagctcttagaaatcttgtcatattgtcacctcaactttagcctacatctaaggacctctaggtcacaggaatttctgtaggcaagtgtcactcagtatgagcccagttgtctgccatcttgattacagaggcctatttcacactcatcactccaaggtcctattgtacaatggagcaacaagtcatcgggacttggagacatgagctcacttaagtggctctgctgtctgggtgacttctctcttgttataagcttcaggactctcaatcctgtgtgctcagcatttcgtaactacaaggtcatttaccaatgagaaagaaaggtaggggaagccttacaacagagcagattctcatctgctctgaggtctaacctttccactttcagttagtgtgataaccagtttcataggcagtgggtcaatataacctttacaaccacctattaaaaaaattactattctaagaaaattactcttatcattcccaattatacgatatgacaaaatcaggaattggaatctcttggaatttgggcagcttgtccatgctcacacagaaaaaagcagatttgtaagttcagtcaaggccatctgcttccaaatcctgcctgcttttttacgacgtcaagctcataggtgagaagggttgggggggggggatggcaggaaagagacttttatagttctgcaaaaacttgaagacctataaatgtgctgtccctgagctgaatacaaagttaacttggaattctccacctgtatccaaagcagtgtgaacagcgagggtgagagcatgcggcacacgggtgtgcccctggttcacccaccaccctgtggtagttagcttccagttactggcacaagctacttgagaaaattgacttgaggcaggaaaggcttactttcgtttatggttccaaaggattcaatgtatggtcaactggatccattgcttgtaggtggcaaagcaggaagaccttggtagaaaggcatgatggaggaatgctgcttgcctcatggtaaccaggaagtagacaagaaagggacagagaacaggatattcccttccagggcacacctccagtaaactacttcctccctacgttctatctcctaatttggccacctcccaaaaataccatcatattctgaaacaatcagaggatgaatccactcattataacagagccctcatgacccacttatccctggaaatggcctcatagacacacctagaggtgtgttctactaatctcctgggcattccttaatccaaccaagttgagaagactaaccatcatacttaatttagtgttccaggtacaggtcttgggtataaggaacatagccattaagacatgtggtcagattacattctgaacagagaagaattaagcaataacatgctggcaaattaataagacaaattcaaaccagatgtggtagctaacacttgtcatctcagcacccaggagattgaaaaaggagcatttccatgagtcagaggaacagaggccagcctgggctatataatgagttccaaggcagcttgggctacaaagtaagaccctgtttcacaaattaattaaaatattgcttagtactccaaagagtaatagtgatgcaataggattctatgaagaattctgattgcagtcctaggaaaggcctactggtggggcggggggggggggggcaaaatttgatccggtgtaggttgggtatggcagggaatgtgtccactataaatatttactagttaaatggctgggggaagtgattgagtggtttagtgactaggtggttaagcagtaggtgctaggtgtcttggggcctaggtatttggcagcttaaatggtataaatgctactagttgatgtggaagttttcctgctagttaacttaattctattactttgatctcttgcagattcctgtgttgggacaaactgtaagtctaacatgtctcttctgattcctgggccaacaataccatttgcaaggaagacccagagcaggttccatcatcagagtccctagctagagtccaggaaaaaggaagaacgggactcttcaggctcaggctccaggtgcttctagtgtcacaggagtctctgcaggatagctctgaggtccctcatagtctcttaaacatggctctagctgctgcctctcctcgcagtgtggctctgtggtgccaaggtttggactcctgtcccttgtccagtcagggaagccccacttttgtcttagtcttctttccttcctcagcttctctgccctccatttcttcctgtcttgtagccttcatggtgctttccatcaagcagaggaaaatctctgagctgtggacatcttgacctctgtgatacaagctcactcttggaaccgataggagggcggtagtagaaagcacttgaacatcactgctctgcttctaggtgagagcaggaggccctaagcatccagggagatgcaggcaaaggcaggaggtgctagagccaatgccagcactccttatctgactacttatcatgactcttagaccatttgtctagacacctgaggcagtctgagctagtcgtgtcttacatgtcaaaaagttacagcctgggaacagacccaacgcgcctgccctacagatgatggtagatctttgggagcctttctcttgtccacatcagagctcagagaggacagacagagaaagcacacctcacctagacggatggagggtggaattcccttctcggggtaaagatgaacgctagatctaagctaggaagcttagaccaaaagttggggttttttttgtttgtttgttttgttttgttttttgctgttgttttcctggtgggtgtttatgtcgctctcatcaggcataatgactgaagaaaatgccacactgagggatttgaaccaacagaggaaggtgggaacagagtcaagaggaatgaggtcagacaatggggaggatgaaatcagcttggaaaacttgacagtgtggtgagggaaataaaatgggaagaggaagatgggagggaagaaagccaggagaaggcacggggtggggggggtggattgggagaagcagaggactaaagagagtggccaggagcagaccagcagaagaaaaggaagttgaactcttgccctgccctggtctagcatgaagacccagaaacaaaggcactgtgcaggagtctccatccctagtgtgaggcctacatctggaacagagagagagcagtaaagcaatgtggtacctgtggtaccattgctggttctgtccccatatctcacagctagggtacatctccaagtccagccaaaccctgtgtttgaaggagacacgctgactctacaatgcagcgcagtgaaccacacactgtcccaggtgaaattttataaagatggaaaattccttaatttctctgtggacaacagccctctgtctataaagtcagcaacagtgagaaacagtgggaattacagctgcagtgggaaaatgatgcattttgaacaagcctcaaaaccagtcatgatcgaagtccaaggtgagtcaccagttagagaagtctggttggaacagtaaggtacagttcagggatcctgaaagtcagtggctctctaggaccccttactctaaatgatgctgagccaatccatcaggtcctgagatatccacactgatgtccaacatgtagccagagtatgcaagggttttggaagagcccggggccagcatatctacccatctttcccctctgaggaccacaaccaaccactaagggggggtcttctggctctgactttctgaggttctcccaggacctggctttgtaggagtcattatagactcactgcatgaggacaatgaacaggctctgaggatgaaactgtgtgtttgatgcagagggtctcacagcggtagctgagtgatgcagaggtcagtccttggcctccagggctatgctgtctgggactttcttcctgacccttgggcttgtgtctccccagagttgttccagacccctgtgctgagctctgtcctccctccatacttccaagaggggagaccacttgtcctgaggtgtcagacaaagctgcacccccagaagctagacctgtggtccttttactctttctacaaggacggtcatgtcatgcagaacaggagtcacaacccaatactccacatcccagaaatcaaggagagagactctgggctttaccagtgtgtggtggccactgaggatggcctaatccagaaacaaagtcaacagctggagatccaagtacagggtaagtagatgagggaagagagacactcctcaggggtccagacatcaggcagcaggcttccctggaagtaggtaaggagtcccaggggagaaggtatcctggatcctggacagtcaaactgactctcccgtcccatgtgccatccagtgcctgtatcccatcctgcggttactctacgacatgaagccacaaaccctgctgtgggagacaaggtggagtttctctgtgaggcccagagaggctcccttccaatcttctactcattctaccttgatggagagatcctaggggactccctggcttccgctgacagagtcgcctccctcctcatctcagtgaggtcagagtggagtgctcagaactattcctgtgaagctaaaaataatgtctccagagagaggagtgagcccaagaagtttcccttggttggtatgtttttgtcccacacggtctctgaaacccagatctcactcctctgtcacctcccaccacacctagcataataatgacttatggcaggctctacttaggggtctacagaccccaatcggaatgtctatcctctgaactggcagagggtggggagctccctgggggaggggtgacatggccaatagtatgatcagtcgctagcaccctccgcaccatctttctctcccacttacaaggcttctccaggccatgtgttttggtttgggggattttgttttgttttgttttttgggttttgtttttgttttttgtttgtttgtttgtttgttttaagctgtccattgtgtctcctttggaatgtatttctgaatttctaaaatgcacatagttacttccccattcacaggttctcaagtcttgtctgcctggaccaacagcaaacggtcaattgcctggacacttggaagcctgctgggtgggatagtccttgccactgtgtttctaattcacttcttcaggccctgtaaaaaagacggttagtaactcttttttgattccttacttgctaaatctctggcattcgccagcctttgacgaaccacagcctgacagacatagccattctctttccctagtcccatgtaagaagttttttttttcctcccaagtcccacaaaggagcactcagaaggacacagagagttttcagtatacacacagagatacccagcctcacatgatcacagtcacagagatacaaacccactattacacattcaggcatgaaaggaaacatgaaccaaagaattcttacaagacggatatgatttatattggtggccttcacatttgaaagataatctgtggcactgaatatgacgggggataaaaagctgaagaaggccttaagcctctcttgctaaactcagccatcctcacgtctgctaagagatagatagtaaataagagctaggatgcacaggtccatgctcatacacccaccgtggacagtgtggtacccagggtgagtcttcattggatactaacacatcagaagggaaatatgatagagaggacagatcaatgcccaactcccaaccctgccactctgtagcttgatcagagctctcttaagagtcatcaaattatctccctctcagggatagtatgaggttttaaattaatcagataaagtatagctacaagtaatgggttcaagtggtacatcgtaagtggctgcctggtaaggtcccattctgggacaagcagaccacgcaccaaatccctccagtgtttatcttctgaaaaggctggttaaaattctaacatggataattctgtagagaagaggcacaaaaaaaaaaaaaaaaaaaaaaaacagatgcttgaatttttgagtttctttgtaacttttgatctctcacttttctccctgtcttggtgatgaatgctggctttcaaaataatcactttgtacatctacatgtttattcccccttgaagccccatttacttcaagccatacttaaaggaatggctatcagtttcaaggatgttcggttccaatttgtttctaggtctttaaatgttcctatagatatttagatcaacccacctctccctccatggggacaacattcttatcttctatttagtctagggcgaaagtgattgctttaatagacttctaaagcaagacgtatttattcaagttggtagctccttctgccaagaaaattttgatgagctttccggaagctcacttattcatcatgatagaccatccccatgaatccaagaatctgaaaggtgttctttctaagcccaggaccaatttcttccctcactggatacccagttagggtgcgggctagcgtttagcttcttttccaggatagcagtctttacccatccaacttcccatcccctccttctttctcatctaaagtctagaacctgtccaggtgacatttcctttagacatttctgcatggtaagagaaagatggattcggctccagaggtggatgggaagatcccaatgcttaattcttcctgtttccaaattaaatggaagtaaaggggtctacactctcttggggaagggcattagccaagaggtgggaggagatgaatgcagacagcctgacctgaatgtttctctttccacagccagacctgaggagctccccacagaagcacaagtaagcaggaatccctgcccttcctaaccgtgtcacgtgtctttttccctgtactgacctaactttcctgcaggacaatcacatctatgcaacggtgaaaaaaccatcgaaaaaaccacagctgggtgagatctccactaatgatctgggcccggcggctccaccagccaagagccccttggtgtctgatgacaggattccctgttagtgcagtgctccctccaacatgtacccatgtccagcctccagccccccagtgctccccagttgctcccagctctttctgtgggtcatccagttcctgggcccacagggagggagcccctgtgccctattcctggccagggacttctgaaatgtgggttctcttctgagtgggaaaccaggcaatagcataggaatgaacaattcccaccttcacacacacacacacacacacacacagagagagagagagagagagagagagagagagagagagagagagttccagaagtaacattggacccagagccacagatctcttttttcaatgcaaatggaaaagggtttttcttccagatagacagatgatagatagatagatagatagatagatagatagatagatacacacacacacgcacgcacgcacgcacgcacgcacacatacatacatacatacgagatgatagagataaatagatgatagagatgataaatgatagatgcatagatgggtatatagagatagatagatagatagatagatagatagatagatagatagatagatagatagataacataggtaacataacaaaggataagataataggtaagatactaggtaactaagtacagacagatgtgtgtctgttgataaatacacacagataaatagaatatgcttgcctttatcctgaaagggaagtatgaagctgtgactacaggactaaaagacctctcagaaatctcagaaaccaaggtcagccagcaaatgtgttgcccagataatttcatagaatcttggcaacggagccagagccttgaaggcagcaaggactctctttgccttcacctgcagttctgagcaagttcagctgggagacagaactcagcttgcccagagctccagattgaagagtgcaccagaaaagtctgtcattgctttcttgtttgttttttaatggttgtaaatctattttgttaaaagaactatgtacatctgtttcgtgttgttcatgtcggtcatctgctgtgaggcatccacactcagtaaaggatctgacacacgtgctcctttagacccagctttactggaatcacagacagcagaatctgacttacctacaaaggaggtaaatcagtgttatcctccaggcaccgcaaacctgctagcatcatacacagtgactccccaggctccccaacatcaacacgattgttgttacctggtgcttagagaaaagcagctgttcagacccaaccccagacctgttagatgacgacctgaatttcaatgcgatccctaggcaatttgcaagtgctttcaagggggctgatctgtttacacgacacattatggaaacgcatccatccccttaattgcctatggttctgccctgaagatgggggaactagaaagaccgcccaggctatcatctactttttcacttctattcccttttcctccttcccttctcccaccccaacccctttcctccctcatcctggcctctctgatcatcaatcctatccatgtccaggcaacactgagcccccctctctttgccactcgaagagcctgtccaagccagacattcttgaggcagaggactcctatggatcagccaaagtgtgcttgcggacccaagccattgctactcccttgatagaaaaactgtccccttaatagaagctcaaaacatagatgtgtcagtcatgaaggaaaacactgttgctaaggccctggaagcctccagccattccagttgttcccagggaccacagaccacctcccttcctgagttgtcccactttccctatactagtgacccaggctggtgctggtctgtgaattgctttcaagaaatctgtgataaacataaaagttaccaaaaatatttagaaacttttatagcaatctgacggtaattttatgtttgtttaatacagtcataaaaaattagagcttgtattttgtaggtatgccttttcattttgtctttctagcaatttgcttttattacagtctacaaaagtacaagtctacaatggacaggaaattttaaaaaactaaaaacaggttgttggttcagacgcatgcaaagcccatctacacacacacacacacacacacacacacacacaggctactcaggaactttgctctccctgctgtctttacagccctgtgtgcccaactgaaaatatccttttcccttggtttagaaaggaataaacggcaattttttttccagaaggaaccattacaaaaaagaaaagaaaattcccccaaagtgcagagagtagagctatctcagggtgcccatacttttcagcccatactatccctggtttgtggggtgttagcatccagaccaaggccccacatccagtctgtggggggaggggaggcatctcacaggggaaaagggacaccatcagttctcaagggacaggccctgttggcactgaggaagggagggcactggagaatactgggagctgcctggtgccaccggcatctgatgtcactagtcacaggactgcccacctgcagccccacacattcggtactacaaaaaatctttttctctccaagtcggagttaaatgcaaaccttttatgcatgtagatgcatgtgttgaatgtgcctttttctagtgacccgggctctatagattcatactacctaaaggacaaggcttcagtgtctgggtggagggtagtgcagcagcatggaattgcttcttaaagaagggagaaggaagctcgatgctgggagcctcgtggctgccctctgctggccggtcccttcagtactcaaagtttatgtgctacctacactagctctgaccctttcaccggtaaactacattttaaaatatggggactgggagcacagctcagttggtacttgccaggcatgtacaaagtcctggcagcacctcagaaacccaatgtggcattgggtacctgaggtctcagcactcatcaggtggagactggaggatcaaagtttagcatcatcttctgctacattgtgagttccagaatagtcctggctatatgggaccccatctcaaaagtgtgtgtgtgtgtgtgtgtgagagagagagagagagagagagagagagagagagagagagagagagagagagagagacagagacagacagacagacagagagacagagagagacagagagagacagagagagacagagagagacacagagagagagagagacagagagagagagagagagagagagagagagagagagagagagagaggttttgtacatggctatacaattttgcaggaccaaatgaaagcaagagggtttcgtgccttgggattcctttcaattccaggttggtttagatttggctaagaaataaagtctacatttttatttaaatgagaaactctgtgtcctttgtggtctcagttccttctgagtctgcctctgcttctgcctctcacactgctcatagggcctcagcagagacccggtggagttcctcaatcggttcagaaagtagcccttgtctacttatttctggaatgttttccacatggagcacaccaatagtgatggtcactttcctcatcaacacagggttgctgccacccagcatgtgagttctgacctcatggggattgcacatactggatgcatgcgtagtgtttatttggtgcactggtctgcacgagctgagaacccaacaagtgttggtgaagggtgcatgtagagttcccctctctacctcagtaaaaccccatggtggctttgtttccttttatgcagccttccttcccatctctagaaaggtatataacggcctcaaaagcagaggggccctaagatggacaccccacccacccactctcctgcaggtaccccctcccactgttccttctctcccactctgtaccacgcccctggttcactaaagacatcatcccttctgcctctttacaacaggctagagccagggtatgaggtaggagaccatgcggacaccatctcaggggccaccagtaaggtatatccaacgcatacatgcagaaacaatgacagtggctatttctaggacgtggccgaagtagtgctttcccaacgtgttttgcctcaggccctgtcttcctgccataccacagctgcccaaaaaggctggctagggaggggctgctggggcccagtggcttagcatctgctaacagatctcgcaggtgtggcttacaaggtattgaaaaagaaaacttcaaactggttacatgatctattagcaattcatagagcagcaacccactcacactgaagattagcaaaggtgcctgataaactgagcggagctgggctccaggaggcagagaaggccagaaaaagcagataatgaggaacaaaaagccaatcagacatttcgaaagttatagttccggtaagattggaactgtgctggggccaaaacaggtagagtgtttgcctcggatgcaccaagcatatgtttcaatcccctagtactccataaactggaagtggtggggcatgtctgtaatcccagcattcagcgggtagagacaggagggccagaagttcaaggtcgtcctttattaccagtgagttcaaggccagcctgtaacacatgagaccccatgaacataaactagcctccttccaatgaactgattaaacaatgtcttgctttttagaaactcatctagtaggaataacctgatgtggtctggtcaggatctcagcccacaacaccctccttcaagtttgagggagcagtagagttctgcctgctctcttcaggcccagttgtacatttcccctcagagctgcacctagaggctacccgttccccagtaacacccggtccttggtcctttcccttgacccctggttccctaggagcctgctgaatgccttttcctccacagccactttgccttaggctctttccctgcccggctctcttgtctctccgacttcatgccttctctcaaccttctctctgtggaagaagcatggccccatgctgcccctgcagactggacattgcaaacacaacttggcttaccctcacccaatccctctcagcctgaatctctgcaccaagccgccctgggttttctgttcgggcaggttgctgggccacctgatgacccttcctgcagccagcagtagaaatgggctaatggggagagccaggctgcaccacatggcagatgaaaccacttctctatcctcagtgtgcgcagacgcctcctgcctccatcttcccagaaaggccccagggagacaggagcagcagccctggctgccagctgctctcctaattaaggaatgcagggagtggcccctttgaactcacctgctaatttactctaacacactcccccctgtggctgggtaattaatgtggtgtgaaccagtgattagcagcagttctggggagaacctgcctgcctcaagacttaacccttccctgcacctggaatggagtgcctcctccttcagtctgcctccctccgctgtagcagaagggaagactttacccccttggggaggtaggatattttccaagcctagcaacccattctcccggtcagctgagggggcgtgttaaaggaccaccagggacagccaactgtgtcctccaaaggaattaagggtctggcccactttgcccccactcttgcatcccacacactctgctcgtcttgtgcactccagaatccccccccccaccagctgccaggcgctttcgggtcatcacctcatggaaagcccgcgtttggcagcacaggaatggtaagagtgagagaggcgtgctctgtgctgccatggagctcccagtctaggtgagatcgggcctcctgttcaacatcaaactgcctctgtctccctcctcagccatctcttgcctggctctggccacttgcaggcatgattcacacttgagcctcactgtggaccagatccatggtaaatcatcaacactaagagggagatctagttcttgaacccccacccctcaggtgagcacactgaaacacagaagttacttttctcatggcttcatggccaaactcggatccaagactaactctagagactgcattcaaagccgctaccctcttctggtttgtactctaaggctccctcaaactaaggcctcccagccttccacccacccacccaggcctggcctttgccctctagctcgcatggcctcctgtgcacacttctagcattgttcttgtggcattgattgtaattattgggttacatatcccatctcctcctctaaacttcgaactccttaagggtaggggctaagcctttcatctctgtgtccccagcacctggcacctaaatagatgctcaataaatgcatgatgaatagatgacagaattgacaagagagccataaatgagtctcctcccttggcttctctgtcccacagccagaaacttccaagctctgctagaacttttctgttcagcagatctattctccagacatgtccttcctagttcaggcccttctgtttcttagctcccttcctcttcctcccccagcctgtactacacaaacagtcccctgcctccaagcagggattcttagggcattgcttcagtccatcagtggcatgctcacctggtacactgcttattagaactaagattcctggacccatctccacccactaagccagcaatcatgggaactcgggtatttaacaaggagagtcactgctctcgagaatctctgaacgcagtggtcagcctgtgtgatcagattccaatttccccttccactctgcctacttcggcttccaaagaccactccctgaccgcccctcactgttccgggagcctgcttggtaccttctcactaagactcttcacacacacaactctttccttgtgttcaaggcccatcagaacctctgccctcctttttctcttcatatctaagccatgctcaaagtgtacctgtcagccaatccctgcccagatccacagacaccttcccccgacccctcatgaattgctgactcttgtgtctagagaaatgtgtgtgtgccagtagccagcacttttccctgcgtgtctgtttctgcaggcagggactctccccaacctctcctgctcaccagctcccatcctatatgtctaattcctgatccaatgatacaaagcatgatacccatttaactaacaagttagacactacgtaggacaacacacaatgatccacactcaggacatttaggaatctttctcaagggcaacatcttgaaaaacttccctgctaggaataggggtactcagtggtagaacattccagagcttccgatacaatgtgcgcaaatgccaaatggatggttctaaaaagaggcaaccttaccgggatggccagagaggaaaagggatgtgggcagccagcttggagaaactgaagagcctcacatgctaagctcggtgtttagtctttatccagtgggcagcagaaggctttcaaagaattttaagcagaggagatgatcggaattgcagctcagagggctctctgtggcaatgatggtgattagacacacagccatgggcagggctagatgcagagaggcctggtgacaatctgcaaggagcacacgggctgtgtgggtgtgcttgtcaccatgctttggcaaaccatgtgcatgaaaaagaggctgacttacaagaatctgctcttgaaagctcagctaagcctggccaggaccacagccaacttccactttatttgggatgctttcactttcaagacatcttgttttgagtcaagattcctccttctgaacatgggactttccagcaggaccacagctcatttcgtgtgctcatttggcctaggatatcctggttttttgagggagtctttggaaggggatgtcggccatgtggtccctctggagtcttcttctctgcgaaggtaagtggagcagatggacagataccctgtcctcaggaagctgaaagcccctccccagccgccctcatcagacctctagacagctgcctctcaaaaccaagtaagaacttagaatctaaggagaagtatagagtgaagcaccctccagggcaaccttaagtggggtcttggctgaaatggggtagcagcgctagtggcctctgtatccaggagacaccatctgttctagaacccagcgcagcttaagatgatggcagctttgagagaaagttggatgcagggatgatgggggtcagtcagtactgacacatggggcctctgcagtccagggagaagaggggagggtaaagcaaagcaggcttccctatggtctgaggaatgttttcagcagcctataggaatgctggggtcccactctgtaccctgtacaaggtgagatggatgttgggtagcgaggaaaggtgacagcaggttaaacgtggtccctgtgggcttgagaatagtcttcaaacgcttggtggcccttcatcaatctgtgcctgagtcttcctctttgatcaacaagagccaacatgacaagatcagcccctgcaggaccagggtggagttcacagaccctcaagacactgttgtatccttcagggactcacaaggactaaaggagaactcactacatgctcagaccttcaatcatttttagagaggttcttgctagcaacagcaagcacttatacagcctccttgtcttgcttagagaaggaaggtgagagactgaaggtcacacgactgatttgtggcaaagtcaggacctgaacctcagtctcaactgacatcccctgttaaccctgaagctgtgtcctgtcaggatggagatggctgggcccagagaggacaaggatgtggataaggactggagttatggccagcagagtgaccatccagaacagggctccttatcccaactcccagcacttggatacattatatatcagccctaacccagccctgcatcccaaagtctcctatttcaggcttggggccagtcttccacaaactcagtgcaatttactgggctcctgtagtctggtatcaaactggggcacagcaagtaaatgatgaagacatttgctctggacctgaaagagtttgtggcctggtgggagatgttgctgatccctgatcactgtgggaaagcagaaagagtgtatacttgtcgtgagagatgggagaggttagaggtgatacttccagagtaagcaggaacaaggcagaaaaggagccaggagggcagttcaagcagggttgtcttcctcagacttcagactccaaatggtcctcagaaaactcagcatcttgctatctcatcttccacctgtctctgtccttgtctcagagcacaaataatgataggcaatgaatcccgaagaatccctgggtacactctctgagttttctccttcactctccagacctaatctaatagcacagtttgctaattacactattaatctctctgtctcaactctccccagccccacagttcccttcccctgttcaggtttccatcacctccctcttgtatgcatataaacagcctcagccttcccacacttcctaggcgttctccatgcctcctgccatgaccattaggccggcatttcatcatgtcactttctggtttaaaacctactgagagactacatataggagcacacagacacactcgagtgccctcccacacacacacacaccattgttctggaataaaaggcccagaaaccaatgttgcttcatggtacagtgtgatcccaactcttggcagcctcgcccacttacttccagtccacagaaccgctttcatttccccatgctctctctcccccttgtatccctcctggtgctgtcccctcagcctgtagcacacctccatccctactccagcagccactgcttgactggctgactcctagtcctccttctggttgtttcttctctaaggtggctccaggctgagtgaggacccctactaacctatttgtgttcagccacttattctcatcatgattcttaatttattttggtggctggcttgaggtctggtttctccttgaacagagaccagtttctcttcctgtttggttcccccatccatgacacacactactacaccctcaactcggggtgcagctgctgggtagtgaaggggccctaattcaattccaagcaactcagatgtttgccaggagtagacaagatgcctacgcaggcacattcacggtggtttctgtccttacagcactccttcccattgtggttatcagtgtccaagtgctaagcaaagtgggggactcggtgctgctggtggcagaatgcccttctggcttccaagtgcgtgaagtcatctggcgatctctctggccgtcagaggagctcctggccacatttttccggggctccttggagactttgtactactcccgtttcctgggccgagtccagctacatggcaacctcagcctggagcttggacctctgaaaagtggagacagtggcaacttctctgtgctcatggtggacacagggggtcaaacctggacccagaccctccatctcaaggtgtacggtaagtgtacccaacactggttccctgacgatcctcctgcaaactaccagccgagcatctggagccatgggagctggggaggactagaatccagaaaggcacggcctttggccactttgctaagtcactctctcaaagctgctcccagcaagtcacatctaaaaaagcttcctacacccttcccaggtgagcagctcacgaagaagccgaagaaggcgcagccgcttcaccagcccaccaaactctctctacttccactctcagctcgttttttccttgactcagcaggcttggaactgatacttacccaccaggctgtcacctttttcctcattgtgccatgagccttataatacccaccatgtacaacacccgtgagcatgaagcacagtggtgtgcagggcaaagtgcgacccattgtgaggtagcatcatagactacatgtggcactattattttaattaccactaaagaaggaaaaggaaaaatgtggcaaatggcataattagtttttacttaaaagctaaattcaacttgaactgtaattaattatagaattttgttctatatttctgttttgtttgtttttgtttttgttgttttgttttgtggagttttgttggtttctttctttctttctttctttctttctttctttctttctttctaaagttagtgctaaagattcaacccagagctttgtacacactaagaacaattctaccaaggatctaaaccaaccaaccctccctcacccccccaaccctgccccaaccttacttttcctaaaagatcctttactgggtatggtaatacgtgcctgtaatcctagcacttgggagtctgaggcaggagggttgctgtgggttcaaggccaacctgagctgcattacttcagagctaaaaatagtcactatttttatttcttagcgtccatggggtgggctttgctccacaatgccagcatcaccgtgtgcagctgtgtttatccctgcagctggagtggatgaattggctaaggatggggtgaggataaaataagcttgctctctcaggctctccctctctctctctctctctctctctctctctctctctctctctccctctctttcccccctctgtgtctctctctgtgtctctgtctctctctctctccctctccctctctccctctcctctccctctcccttattccctctctctctctctctctctctctctctctctctctctctctcccctcccctgtctccattcatttctgttgctccaggccttttaactcccattcatctcatcttcctagtgacttgagacaaaactgtgagtggggcccacaccagtatttcagtaaaaactcaaaagatgttaaaggttgcagggagtccaaatttaagaaaggaaagtgggaattgaggctggaaagaggatgaagaggagatagagagctttcgtgtgctgggagggttctcaaagccctggagtgagccatccaggatgctaatttacagctagaggaagcacttccagaaacatggaggcctgaagcaagttgtacatctcagcaggcagaatgctgactgggtttcagcactctttagcccctagcccagtgcccttgtacagtgaatgacctccacagccaggcgggctctggagcctctccctactccgtctcagctgctgcacgtgtaaaacaaggacattgagcttggtaatgcatgcagcacccacaccactaagccctaaaatgccttgttctcagtatctgaattacagattttaaggaaattgctgttttattgcttccaaatacatagcgtgattagaactaattgcaggaagctgccaagcagccgtccttaggagctcggctttgacaatagataagaatgatttgaattagcggatcggttaccagaaatgtcgatgggtgtttctactgtgcctgatcgtgtttggaggcagcttgtcctcttaagtggtgtaaatatcccccctgtaatctctgtttatactattagtatgcccagcaaatcatttcttttttcatatcacaaatcccaccagattgagctggcattaacgaggttttactctgcttgactttggaatgctgtcagagatccggccctcctgttgtcactgtaatgctctcccactggccccattgctagagattcgggatttactcatcaatctatataggaatgaggagccactgcttagcatgccaggacactaattggttagcagcccaggtaccaaacaccaatttgccagcacaagagagccaaggttatgctggtgagagagagcccctcctcccaggctcctcattcatggcattttatgcccttacaatcattttcttgctcatcgtcacgtgttagtgtctgtctccgtcaccaaactgagagctcccaagtgcaggaatgtgtgttctcacctgaactaataaatgcttgtcatcccttgttgactgactggcacactgtgaaagaagtgcttccaaaagacatgagcagaatgaatgcctggagagtggagtcatacctgaactatcacagtcgaggcataaagcactgtatctgactggggaatggggggcggtcttaaaggctgcataggaggtccctaggtgggccagaagggaaagaaagaataggccaggcttggtggcacacctgcaattgcgacattctgacagtgaaagcaggagcagtgtgggtatgaggacacaccacaatacagactaagaccttctttagaggaggcaggagcatttatgtgcacagatgagccacacaaaagcatgcaacgtctgaaacagccctcacgtttgggagacctgcaaaccaatggaataggtgaggaagaccagcagagagtatagctgaagaggttgacgcaaatcattgcataaaacctttagctaccaagctaaagaatcaggcacgggaagaaaaaaatgagatcgaagacccaaagaggcatctcaccatgcacagaacctagacacagagcttggattccgcccagcagccctctaacccactctgctctgctattcatacacagatgcggtccctaagcccgaggttcaagtgttcactgctgcaacgaaagaggctcaagccccccaaacctgccaggtcttcttgtcctgctgggcccccaacagcagtgacataacctatagctggagacgagaggggacaatggatgttgaggtggaaatgcacagccttttctcaaatagacaggtgttaagtgtctcactgggactgagagacaaagatgtggcctacacctgcattgcctccaaccctgtcagctgggatacggccacggtcactccctgggacagctgccatcatgaggcaggtaggccaaggaccagtaacctatggtttagggactatggtacatcagacccatctctgactctaccctccatgttgcagcctccggaaaggcttcctacaaggatgtgctgctggtggtcctgccaatctcactcttcctgattctagctggtctccttggggcatggcaccactgcccctgctcaggtaatcttataagtgcagaacatggggagaaggggtgggaatgctaggaaatagctggggctagacctcccgccacttagatttaaaggccggcccctttgcatctcctgtctcgtgtcttggccctccccttacacttgggtctccaaccagactgaacaatttgatttttcttcagcaattcttcaaatgagcggctgggtcacattccccacagggctgtgcgcattatattctctctgcctagggcacactttctgtgattttttcctttccctatcagactgagtcttcaaggggagtgtgttccaggaagccttccctaactccccctctatatgtctacttcagtttaattaatatccttcctttgatgaccttcgcttaccctatcccaaggacctgtctcctcctgttgacttttgagcctgaccaaagcaaaggctgggtcacgatggggcacactcagtgggtcccttgagcatcctggctcctaaaacaggaacagcagtggtgaatagttgttgagaaaaaggattgatgaatcctactcacttcttgccaaccattcttaagaaaagaactcctgggagaagccccacccccagtggctgataactccttcagaaaagtggcgaagaaaacctggtcagatcagattctaggctctacgcaccgcacagataattattcctgcacctgcccagatgcccttaccttgcccctgaagggacatctcagatgacagaggctctgtggctgttttcatgctgagcttgctgaccttgctatgttagttgtatcctaaaagactggggtcttattctgtgacaaggcattggatccaggggtgacagatacttgtgcatttttctcaagggacaggaaagttgaggtgtacgtggacagtttagactgcactctatttagcggtcctgtctgttaagaagagggtctggtccacaacctttgctccccaagatctgtggtaagaaggtaggagtcaggaaaagagcagtttttaaaaactattttattgagatacaaatcagacattgtacaattcacctcgttaaggtgctcaatttaatggctttaagttaatccagagctttacctccaaaccacaaccaattttagaacatttctatcgccccccccaccaaaggaagactatctatcaccacttagccaacactcctcacctcccctgcactacccccagccctaggcaaccacacatctactttatctattctggacagttcacaagaatggaatcccactatgtggttctttgtgatggcctcctttcacttaccctagcattttaaaggctcataaaagagctgtggccacctgggataatgtaaaagctccacacggtgtgttcaggggctgtcctacctctgccacatgacttcttgtcattcaaccaggcacggcacagccctaaaactcatagtgttaacattaagaagaatgtcctgtccttaagagaaatctccttttccaagattttagaaaataagaagggatgattgggttcaggacatctagtattcagagccacaggctaagtatgccaagactctgaacactgaggggtaaccttctaatctcctcaccaggaaaaaggaaggatgctggcactgacagagtagttccggagacagagaatcccctcgtgtaaggtgtgccatgagagacaacatagactgatgcttagaccaacatagaccatgatgagacagacaccctgcccagccacatgatgctctgcacctggaaacttcccagatcctcgtaacttccacaagtctcctgtctgctgctaaagaacagccaaggaagccaccatcaccctggttccaaccttctccttctgttttgcacatgctggatcttctctgggcaaggtggactaagaggttgcttccttaagagccctggacattccccaggatccacagagacattgtttagccaaagcattctttcttgagcaccatatagaaggaatcatctaactatcaagagactgcctccaggccaggtcctgggacctaagagatatcagatgtttgaattactggggaattgagctaaccactgccaactccaacctcagcccctggtgtctaagatccttgggtgcaagatgttatgataagaaaagttgcagaacaaggaaaggtggagggcagggctttttgtttctgacctgaaggacttccggatcatctgagttcaaggctcctcaaaggtaaatttgaggttattaagatgatgaaggatatgccgggcattggtggcgcacgcctttaatcccagcactcgggaggcagaggtaggtggatctctgtgagtttgagaccagcctggtctacaagagctagttccaggacagcctccaaagccacagagaaaccctgtctcaagaaaaaaaaaaaaaaagataatgaagggtagctgacatgccatcttctgatggaagcaatttttttttttttgaggcaggctttctctgtgtagcagggctagctgtcctggaaccctgtagaccaggctgacctctaactcacagatgggtctacctctgcagcctgagtgcaggggatcaaaggtgtgcaccaccacctcccaaccgaaagccatttttctggtagcaccctattaatagataccttcctcagcattaactctcatgcctcctgcatgatctgggtggtgtttgagagtctctctatacagtctacacagttaccagaaaggaaaaaaaacaaaaacaaaaacagagagtttgacccagcagacaggaaagccttgcacaacggctagagaagcagctaagttcagtctaagtctatcttcctgaaactgggagaataaagagccatggaaggctctttacactcgaggaagactggagggaagggtactgtgacatttcagaatctgccacattcgttttcatttgcaagtgtagaagattctcctaagttcaaggggagagccaagtccctaccactcaaccgtaggattgtaaaggttgctttgaccactcaactgtaggatcttcaaggtcactttgacatccctcatagaggatattgttatggccatctttggaaaatgcatcctgccattgaataattctgttttgaaaaggtcttggctgtttattgctgcttgggaaaacaaaacacttgatgagttaaacttatcctcagggaatagtagctacgaaggttcatgcttattcccatccaaatggaatgggttttatcctggggtcccatccaggccttgataatagagaggaaggaggtgttgaagaagcagagacagttttgagtatgtttcctaggtggcttcagtctctccacccaggaagtcaatcctgtcctgacacctttcctcctctctccagggccacgacggtcactttacctgggacaaatgatgggcaaaatccactgattcgtgtgttcacattacagacttcttcttttgtaccttggatccgctcttgctgacttttctcagaggcccctggctttatataattctttccctctcctgcagtcacttttcctctacctcctttcctctaactccctcctgcagaatgcacatgcccactcaactggcagcttcgctgccctcccccgccacccatagtcatttctcaccaagtcacagaaaaccagcctgtccctgaaaaacaatgtgaacaaggaagcctgggatctagcaatgagccatggaggtttggggatgataaacacacattgtcacccacttttcctccctttatccccacaaactcacctcaaatcaagcatagttctcctctttgggaggtgacttttatctgccttgtatagacagtgattttgagtgagttgtaccagggcctcttgggacaggcccacgatgctcaaagaaactaccgttcccatctgcagtgactcacttgtcaactagtagacttattatccttcctctagaaaacacaaagtgctcatagaagaccaatcttattctaagagacattgggaaagaggcttcaaaagttacaccatcccgagtacaaactgaacgctcagtgtaggttgagaactccttgaggcactgaggaatcggtttcgggtgaagccaagtagagtcccatgttcagtggcatataaataaattgataagtaaatgctaggtgcagacaggttctgtttaaaagataaggcaggctggctttgtagtacaagcttagagacgtagctacttggaaggatgaagtgggtaattcaaggcctgcctggactgcagagtaagttcaaggccagcctggctggtttagtcagaaacatgtctaaaaacagaatgcaaaaagatgggctgtgggattagatcagtgggagagtgcttcctggcatgcctgaggctctgggttcaatccctagaaccacagaaaaagaaaggagggagggagggagggaggaagggagggagggagggagagagggaggaaggaaggaaggaagggaggaagagactaggcactgatgtgtgggacagaagactcatcttaactaagatggaattgagcactggcagagagcgctctcagcacaaatcttacaaacccgttaagtggaaccatggtttcacagcccatagagactgggtggccgtatcgaaacaaaggagaaataagggaagggaacattcccaatgagactggcaccttgacccactggatgttctagcatgcatatggtcagattagaaccctctccagactgccttttctcttccttgttctttatcttcaacaatagcatttgagcttattctttttctataaaggataaacacaagatctgctgagaccaagaggtcaaatgacagaatgttagactatagttgagcatggtagctcacacctgtaaccctagcactggaaaggctgaaacagaatttctgggacttcaaaggctagcctaggctatctagtgtgtaccaagccagcctggactacagagcaagggtaagagtatagcacaggaatcagattgaagagagcttcatttcctttatggagactaaatactcagtgctttaaagagggggagaatggggaaaaagaagtgtctacattcatcactggcatccccagcaagcctttcttccacattgacgacctagtgcctgcaccatgttaaccagctctgactgatctctcagggaaacaactgttccttccagacttgacccattggctccttgtatctgtttggcatgcagcctgagagaaaagtctgtaaagctccagaatacaacctccctaggtccgagaaagttttcaatggctgtctctcctttaggctatttgatgttgacaatcaattgccaggagaggcaggcttagcctatgagtgggtagtagggatatactactgcacagctagcctggggctcccattccaagaggtcacacttttagggagacacaataaacttttgtacccagaagagaatggccagaatgctgagaagtctagaaacccttgtcctatggagaaatgattgaagaaactggttgaaacaacaacaaaactcagatggatgcagggttacaaatatttgaagggctctaacataagcccatactgtataaccagagccaatggaccatgttaccaagatgtaaatattgacccatgtgaaaaataggatgtcacagctagggggcaggttcggcttcttgggtggaaagctgaagccaaaaagatgtaattagtcaatgcaaagtcagaattaattctaaaattagtttctaaatcatttcggcccttcacaatgcactacaccaccaggaaagaacttttaactggtgatgaaatacaattatgaaatgaactgtttcaacaattgtgagtaagcagaaactgtctcagagcgagatcacagagtagagattgttcataacaggaagctgtactaggagtgacaaatgcattgcatggatatacaaatttctgtcttccagggccatgtcaggcccagctaataaatgctaacacacttttcccactgagtctggatgcaatgttgacaatacccccaccaatcaaagctgattgccaggatgaaaactgtttgctattcctgcccctgaacaatctatagcatccttccactagtgagaattcattacaatttaagggacaaatgaatgaataagcaatgaggtgaaagaggccaggggaagggctctgctaaggagttggaaagcagccatgctttgtggaggaagatttatctcgcttcttttcttctgccatttttctcagcatgttgcttgggggaaatatcagcactgtaaagggaaagtgatgggaagtagttacactattaccaagaaacacaaaccagcaatcatacaaacaagtgaataatacacacagccattgaaaccgtcatgtttttagaatgtctaagaataaaagagaaacactggcattagtcaggattctttgggtctatgcaaaagcaaaaacagcaacagcaaaacagactctctctctctctctctctctctctctctctctctctctctctctctctctctctctctctctcgcctcaagtaaagcaaataaggaatccatcctaaagttgtgggttgctcagagatcccaatactgaccagacttggggttgccatagaactatcctcttgtactttctgcactgcagtcacgaactaaagagtcaaaaatcagtggcattagatcatcttactgaagccaaaaacattccttttggggacaacggaaaagtggtatgtgacatcttgtcagaaacaatagttggtttaacaaaatgaagtttaaaaaaaaaaaaaaacagcttgaacaggaatctgtgtaacaggaaacatatccatctgctcattcgataagccttactaagcatctgccacacagaggtctatcagttactaaaacacattacagccctgctctcaaagggctcatgatctcattgtcaacagcagtaccaggacagctttacagcatcctcctgaccccagtgagttcaaaactgcttcctgatctgtctgacctttgtccccagtaagggccagtccaggccctggaagaaatggcaaatggcagctttgcctggaacagctgccgggtgtggaagactgggtagcattgtgatatcctgggcaggtcttcccaaagcaaggactctgttcagctgtgttcccagactatggagaagtccccggctggtgggtaacctttagcttcccctcccagtggggcagaaaagggagagtggtgctggggccagagccacacttccagggaggggtgatcctgtgacctgggattcttggactgagacactgtcacactctgtcttgccttcaagcccatcacacagccttcctgttgcactcttttactggggctactcagggatctccatagtcaggtaaagtaaatgaaactcgggcataactggagagaaagtgaggtgggtgtcaccccatctgctgctctctgcctgaccattggttagtctactcaccacctgccaacccactgccagcataatcgcaggagctcagaggtacttaccacagtcctgcccatcagacccaaggacacatcagccacaatcccacaacccatgatccactggttatctggccctcaaatattgtagactcctcctgtctcttattgataacaacaaccttacagaaaattcccaacagccccatgctccaccccaccctcacacaccacacatcacacatgcacaacacatacaaacaacacacacaattcacacagcacacataaacacacacatacacacaacacacacgcacaccacacagccttggcttcctcctaaggcttgagtgcacatcccacatgctcttacctcagcatgagcaggtaagagaggatgtggaccgaccatagacctggctactacagggaaaaagagaagaggtacaagggagagaaggaggctcacagattatctggaggcctgaagcctgggcagtcaagagaaggtcaacgtctcaccagtgtagtcatctgccagagagttctatataaaaggccatagttagcacccagagcgtcagccaagttcaggtagtggctaactcagagttttgttccctgcaggctgtgtcctaaaaggacaagtagagtggaatgcctgtcaacccagtccctgtcagttacccctagggaccatgctcagaaataataccaccctgcacttcattaaaatggctactgcttgggtttgtgctgccggcaggtttccttggctcacctccatcagcaaggagaccagggacactacctggagttcaccgtccgtctgaaccatactttgaatccaagatctagaaagtcccttcccaaacaagaattctgagacttcttttctggattcatcctgcctaagataggtaaaatccaagtatgtgcccttaggtctgaagttagctttaggggtggggagcagtgaggtattcatgatttccacatgtgtgtgggaaatcctccacagtgaaggatgtagttacaggtaagaaaagaaagggtccaccctcaggcccagcacaatgaactagtttttcctttactactgtaggttgtggaatatttgtttagcctgtatgaaggtttgtcactgtgaatggccaatagctaggcaggaaagaatatatgggatttctggggagagagaggactctggggagaagagaggtggggagatgccagaggcactgaagaggtcagacatatggaacagagtagaggtaaccgagccgcagggtagaatgtagattaatagaagcagattaagttgtaagagctagtggggcaagcctaagctaaaggccaagctttcataattaataatgagtctccatgtagttatttgggggctggcagtcccgatgaaaaatatgactacaactatgctttgataggaaaccccaaagtttctcagtccaaatttgacctccccagtcattttgaaagaaaaaaaaaaaaacacagctatttcaagtaagagcgtgtttattgtttaaggattttgcacgtgtgtgtagtatgttttgattaaactcacccacactcccttcccttccaatcttcccacagcctccctaccgctttcctcataatttccaatttcatgtcctctttttttttttttaacccactgagtccacttagtgctgccgggtgtgtgggtggaggaccatctgttggagcataagtaccctctcagaggtcacatccctgtcctccccaagacaccatcagctgccaatagttcctcagccaggaataggactccacaagcccttccttgatctgtgctgggattttggctctcttgatcgtatggcaaggagagtgcatgcagggacagcccctgtgagttcatgtgtgctacggcactgtcttgtccaccaaacaaacacgtttcactgcagatgcccactatctctgacttttaaatcttcctgctccttcttctgtgatgatttatagttacaaatgttaagggtgggcttaaataggaggactcttccccttggtctcctgttatgattgcgagccactctccataacaataggcaaaactccagctttgcctatagctcctacagatacataacaaaaggctgtgaattcgaacttggcacaacagactctgatgtcccagctgaccgagctgtctatcttcaggattccttccctcagcatgccttcaatgagagcctactacaagtaagcaacactgggaaggcagacagctgccaaggagacaaacctgcctctgcctctcactgcactcaggaagcagcagtcagccaggcagagacagacacagaaaaataagcacaaatgggcgattaaaagtgtactaagttgcttcagaagaaaataacggagaactgcagtgagaaaaaatgagggagcaaaatatagctggcaggaaggcagctcgcaaaatgcctctctgaggaagggatgttcaagccacagccagcagaaagagcaggaattggtaaagcagagtcggggaaggcagacaaagctcagacatcagcaagtatgacgagctttctggaaagatttcgatgtgtgtggatgttgaaactatagactctaaaagaaggtccctgtggccagtgggtaatgagcaagaggggccttggaaggagcctgttgcagaggccaggtcaggcagggtctggtaagacatggtaagatttaaattttaattatcaagataaagggaggccactgagggctttcaggaggaaatgaatgacatgatccgacttgcatttttaaaagacctggctggccctgtgtgaagacgggagctaagggggaaataaaagccagaatacaaggccactgcggttagtgacagcagcctccagtagacatagagcagtggtggggaaagcagatgtatccagtaagcactcagcacctggaatagacagggcattgtgtccttggtcaaaggaaggccaaggccaccacaggggtatctggtctaagttgacatgatgggtagatgtgagtgtcattcttcaaagctggtaatattgagagccgagcacattataggatagagtcaagaattccctcatccttaattatcaggagacaggagctaacaaaacaatatgagaaggatgaaaaaatatattgggttggatcatatgaaaattgtcatagatacaagcaatacagatgatttcagagaattccacctagtaatttcaatgtaagtcagcctaaagaagaaaaatccttcctccgctctggttccaagcccacccaggatcatagggatatgcctataatcgggcacttttgcactgcagatcttccaggttccttagacgtgaacgtgagaattatgggggtatttttaagacaaaagcagctcccaaagagccttcagcccaagctcatccagacccacaatgtccttcttcctggcctggatcccgtctttgcattttcaggaaaaccaaggccattcaggacctaaaatcaatggagagtgttggggctgccttgggaactagaaggaaacctcctgcaactccaaactacccagagactcctgcagcattggggtcccacacagaccatctggatggagtccctgagagacagctttctatgcaatggtagtgacatggtcaaactaagtcagacagaaggctggggcttcacttactacaaagcatctgttttgtcccctgctatgattgtcacacaggccaggtcagaggcactaccatatcctttcataggaaggacatcaagaattgctgcctcaggtcaggaaactggggaacagaggtgcaaaatgcccttgcaagacagttggaagctcactgctgattagtgtcccatgcctgcctgctgatggctggcagctggctatatacagcaaggttaaagtaggcaggtcactagatgcacagtcactctgggttagagatgccctagacacttccaatggctaacagcatatctggggaaagggaaggcagagagagattcaagagtatcccaagcctgaacagaggagaagactacagtctactgcatcctttttgttggccctgtagccactcagccatcactatcctagtggacatccgattaccaagttgtccccttgcctggaaatgccagcaaggcctcggtgatgctttcagagctaggtctccttcctggaggctgagccatctgggttctaaacactaaagaggggtctccttatactgtctgggtggggaaaatctggagaaaatgcaaaggaagccaaattcactcaaccctggcaggatacagcttcagtggactatttgcagcaaaagaaaaaagggggcccagcttggaggatggatcccctgctggggtgcatagcagctaacacaggcaaaccttcccagctccagacccaagggccttaagatgaaggtaacagccatgagcagaccccactcacaccctccattccagacaagcaaggctcttatctatctgagaattctgacacattcaggcactttatcccttaatccaggcactcctccccaactcccaacctgacatgcaatcctttatccatcttgctctccaagcaagtgattcaaggcccagccctgggcactcctacttgcagaagtcattcctcaagtgatctcacagcaccaagtctccccagctcacacaaaactgaatcagcagctacaggcatcattctataatttttccaaatgagcttaatcgtctccctcaggagaccggctgctcctagaaggatcgagtctcatctccctgccctgtcacacaaattaagcacacctcccaaagcatgtttgttaattaagaggttaatgtggggagctaggagcagacaggtggacaatacataacaattgccacatattctttccactgagtgagccaaacgtctcaggttgggatgttctactactctgacttcccttccagacagtgcagtcaacagtctaggcacagacagccttctagagccttcatcctgcattctggagaagaccgcttatcccctaacttgttacctccccaaggaatgagaccaaaggttatctcctcatgcttcaagcaatctgtacccttatctcttttctttcctaggaacaatatttactgagtattctctatatgcctggcatttatttatttattatataagtattattgatttatgtgtatgcgtatgtgtgtacatgaggtatgcacgtgccacggcacacacgtagaggttacagcacagttttatggagttggttctcttcttccatctttatgtggattctggggatggaactgagttcggcaagcttgtgcagcaagcacatttactggctgagcagttcatggctgttttcagagtacaagtacattagtgaataaagcagataagaatccctgccttacactacctccttgtagagctggtaggaggacaacgaggggtgaatctattaccagcagtctccagtgaataaaacaaaatatgagacagcctgcccccaaagacagcctatgctctgcaaattaaagaaaagggtggacagtcagtggtggtgcatgcctttaatcctagcactcgggaggcagacctctgtgagttcgagaccaacctggtctacaagagctagttccaggacagcttccaaagccatagagaaaccctgtctcaaaaaaccaaagaagaagaagaagaagaagaagaagaagaagaagaagaagaagaagaagaagaagaagaagaagaagaagaagaagaagggaaggaaggaagaaagaaaggaaaagaaaagaaaaggtggtgaagtttaagaatgacaagcataggcagaagacacggtctttaacaaggtggccatgatggaccacactgaaaaggatactgttgagagagatttgaagaagatgagaacttgcattgagcaatctggaggagccaagggatcagccagggtgagaaccctaaagtgatgcaatgtggctggagtggattgagctggggaggggggctgaacagtaacgcaagtcccagatggtacagaaaggtctggaacagccaagagctttgactctggaaagccatttgggaaggctaagcagaagaatgctcaacaatcagtctggctcctctgtagatagatactaagctgttgtgaacgggaagcaagcagagcgatcactcagggtccccatgacgtaagccaggcaagacatgacagtgctcaggaactacaaagcaacagtaaagaatgacaggttctagacttactctgaaggcagaaccaggatctcctgactagggggagatggtggggaacagataagaaagaaattaacagacagaattgccatctgctggaagagagaaatagcaggatggatttagggatgacgataagcagtcttccaggcatgctaacactcaactgtcttaaataagcagagagcaagtatggaatttaggagagaagtctggcccgagtgcgtaaataaacgtgtgtgttgttggtatgcaggtctggcgactgtgtgggaagtggaggagaccagtggagaaaactgttccttgtttcccttttcggagtatgtgctccattcctggaaaggcttaatgcttactgaaaagaaggaatcagatttccccacaggagcaatgtgataatagcaggttagactctggacaaggaccagttgctcaatttcttatagcagtaatcacatacatggcgtttcctcaaggccttcataagctgcaaatgagaagcctacatgccacgcaaggaagaactttgacagcctgctgctcatatggcctccctgggagacacggcccttggcgcttgccttggaagcctcagagtactagcagcagcttacccactcatggtcctctctgttcatccccttctctcagggagagttaagttcccaggtaccttcaagaaggatttgagaggagatacacgcagccttgctactccacttctccaaaataatcacaaagccttgtctttaccaaattgggagaggagaagctagcacaaactatgcatcttactaattttacccagtcgctgagctccctaaggagtaaatcatgagaaaggaggagacgaggccacaccacccttcatggaagcttgggttggtggagctagagaacaacaggacactccccaaacagaagaaggtaattgagcaaacaccctttccctgtctaaaagcaggggagaggttgggatgaaggggtgggtctagttccctctgcttcctgtgaaagccagatgagaaaggggtcaaagaaagaaggcaggggaactttacacacatggaaaactgccttggccaagagctgaggcaagttggggcctggggctagaggagaagcaaggagcttttggatattaggatctcaagacagttggcatcatggtaggacaaaggcaggggtgatccagaaaatgctgaggagactgatcaaagaggtcctgaactgagttgattttctgaagaaaaagaaaacgcagcagagctaatctgcatccaccctgccctgtggggaaggctcctccaggctaaaagctgtgtgaagaactcccacctgagaggggttgtcatgctcagggctatagtgggcaccccaaaggacagcaactgtgggcctaagtgccaggaagacacaccctggtcccaggaggcaccagaggattctggaagctgatccaggcccctgctgagcttgtgtttcaggtgcttcctgtaattattagtatcgctgttactaaggaggattgctgtcaatattagtggactgcaggcctcacaggcaaggcctgggcctcctacttctgctgctgactgttcacagaattccttgtcccctccagatgctgaactgtctctaaattcaatcccaaaacatccccttccctccaacaacctcaggcttcatcccaatccctgtgtggttggttgggtccaggctcccaggcctgcccttttgtgggatatgaggttccacattagataccgaggactcaaccacttgctgagtccctgccacgtagctgtgtgtgttacatacacatcacatcagacaaccttctccgtggtccatttcacagatgaagaaactgacactttggaagcctgctcagtagctatggatctagttctgtctgactctaagagcacaggctccttttgcatatctgcacaagaaaaactcacaaacctttattacaactgttctattcctcttctgtttctcctactcccccaagtccacacaggacccaccatcactgcactcagcctttatgaaaataagttcagcaatttgaccccaggcctcacctgtgtagttccttgccgttgtccagcacttctgtctctcccctattgctcagtgtcacatccgaaaggactgctcaggacaatggccacagaaggccagcaggccccttcagcacattcgcactaaggacaaagagctgctgataaagatttatatataaaatcaggtcacgggccaaatttgaccctcaagctatacttgccaacctgtgatttaggtcacattgcctgagatacactgtagtccctttctatttgacttccacgatttcatataaacagaggctgttgtatgaaaattaatgtaacaagtgagaacaaggaactgagtggaattgactttgcttcttcaaccaggaatagatgaaattgttgtttcagatagaaaaacagatacaggaggatttcccaggctcccactaaatcgggggaccaaggcaagagaaagaacctgggaagcttcagagacagatctaatatcttaatcagtcattctgttccctcaaaccaggctacaacctagtcatagtaagtgggggcacacacatacacaaagtggggggaggagagagacacagagaaacacagtgagagtgagtttggctggacctagacttgacctagggtaataaaagtgcaatggtcaccctgcatagccatggttaccctctgagagataagcaggcaatgcacaggcttcttcctacccacaggctagagaattgactctgtgtttttctaaggtgagggaaatcagaggggctgagtaggtgaagactcagaagcatgtccagcagagacaacccaccatcagatgtgctggaaggcataattcatgaaaatcttgaggatgccgaattgagtttctgatagctatcaagagagcggggtgtgttaccaaggagatgtcgattatctactaattcttcaatgacctaaagaactagaattcagtcctggcaaggttgggaagaggtgcaaaacacagaaccagaaagaggaatggaaataggtgattttgtgctatttgagtctctggagagacagacagcagtaaatgagaactgtttttaagatgtcccttagaggcagcgtctgggcctagccagctgtttacctggcattgcagtctagattagtgaccaccaaagtcctgggttttatgtgcttgacttcgctctctgccacttttgggggaaagtggaacttgtggaaggaagttaagacatctgaggcatgcccaatccctcctcaagccttttctctttgctttccagcttgagggaatgagcctcttcctccgctgtgctttcacaactatgtgctgtctcagcaaaggcctaaaggtgaggaagcaaccacgagcagaaatctccaacactgtgagtcaaaatcagcttttcctctttcaaaattcttatctcaggaatttgtcataatgaatcaaagctgactagcaagcacagtaatatggcccacctaaatttggcaacccagctatccaacaatggatggaaagtaaatcctagaaatgtacaatcaaatgattgtatcaaaatagggatgctaagaactagaaacctcactacctttggttatttcactaccaatcttttttatttctttatttttttctactgtatttgaattgtggaacagtacaatggtatattatatggaatatgtctcccaaccccatgccactaacatcacgtggcagcttgagaatttatgtcacagaagataaaaaatgccacaaatcaaagctgccacgacctccaccccagtccagctcacccccaaattcattgttgaatgtgcaccaccatataatgggaaattaccaatacagagccaagtggaaatataagggtatttaatagggaaaagccttacttacagagcaacctagccaggcggcgtggcagcgggtctgtaggcaagccaaaagggttaacagagacgcagtccccttcaagtctcactctacttcatcctgaccacgccctcgaaagcgttggcaggcacacctgtagccagcccctaagtaggcatggctacagcttcccctacaccaccatatgtgccctcctcccacaccaaacaggttacaagcagaagaaatgagaaggaaagacccagatgttcttgtagtaaaatcaattgttgaaaaataagcttccctcactgtatacacttagaaactccccttgcaaccaaactaagccctctgaatgtgagtgacagtcatgtggcttgatctgttggggggcaccctggcagtaggaccaggacttatcctgggtgcatgaactggctttttggagcccatttcctatggaaggatacattgctcattcttgatacagtggggagaggtttgatcctgcctcaacttggtatatcagactttgttgactctccaagggaggccttaccccctctgaggagtggatgggagtggggaaaagggagaagggaaggaaggggaaactggggctaacatgtaaaatgaaaaacattcaaatataaaaaaacaaaggaaacaaagaaaagaaattcccctggcttcccagttgactggccctaatagtggttgttgcccgagcctcacaattgtcgctgctcaagtgaacactgagtctaaacatggctcccctactcccagaatggtgtaaaaggatgccattcaacatagcaagtaagccacatggctgcctcaacccctcaccaccccacagaaggctgggctggcagtccctcagagtgggaacacctcttcctcaagtcggtttcatcagtcacctgcctgagggcaaaagtgtgcctggcacagtgccctgctggaaagctaactctatctatgaataagtcatctgaaaggctctcataaacatgagcaaatgattgctggcttctggaagtctcaactccctccctaactttcttcccccttcatctttatacacccccaatgtccagcccccagttcctagtggggtctttgattccctttgtcccggcattcattctctctcatctgtcttgccaagatggtaacaccaccacccctggacaaaccccaagtcatctcagaagtttccaggttatttactaccaaacaggatgctctaagccttatgcatacctactttatgttgccctagaacaggagaaggaagacgaggagatcccttaacccactaacaccagacagatgtcctgtgaggaatacaaccatgtggtccgctagaggcattggctggaaatatgatgctctgggctccccacagagagatctgggaccaaagaataaaaggtacacacaggcaatagaagaaatacctatgagatcttcacaaccaaaggctcatgtttagagaggcagtgaactgccactgaaggtaggcaagagggatttgggacagccctcaccaggaatggcatagaaggaattcacctatcagagaacagcctggtgtcctggagtcaaatatgcctagaccgaatcctgagttagcgtgcccctccccctttttgccttgattgagatacttacttcccctgaacctcagttccttttgggggtgatgcacagcgtcccagaactaatgttaagaggtaagtaaaaagaaagcatttggaagcacctggcacttagtggttgtctaataaacttaaccttcccgtgaatgacagggctgagctagatctcctcagcggttcctattccagagtctgaatgactttagagcccttcctggctgctggaaaggaaggcaggcatacacctgggcgagataaagaatttcggattaggtaggtggatggagaaaagagggtgctgagaatggtcggggaccgtgtagaagtcatctctaacatccgcccacccccacacttgtcccctctcctagagtaaaaagggaaacacgggtttggaattttaaagtccgttctgaaggacctcagtttcccatgtgtgctgtgaaggaataggactggctgtcccctgccagctgtggctttccctacaggaaggggaagcagagaattcagatagaaggcaaagcagtaaggaacaacttgtcggggttccccaccccaggcccagccctccgaggaatgcgcgggacagccacctaggtgtcatctttaagcttctttattgtgctaacactgttgcctcggagctcagatctcacacacagaacaattcagtcccgacccccaccatcccagggctgggggccctctgccttggctggggacagcaggcttgtacctctgcggttctgggatagcgactgcttcccgcccttcctctccctggagcccaggggtgagggagggctctgaactacctttgtctgtcccccgccccctcctacttgagagccacaggaggctctgtccccctaggcgtctctgagggaaattcccctgaactctgtgccgccaggcggccggtgagagccaggtctgcgcccgcccgagcctgtccccagcagcgggcggagagccccgaaccgcctcccagccggggcgcagcccggtgctgcgcgctcacactaagaggccgtccttgcacggccgctgctcgacctgggtacagtcggcgcaatcggccggctccgcgctcttgaccttgatgtagacgggggaggggcccgcttcgcaggctgcggagggtgtgcggggcactagggccacgtcgtcggggctgccgcagggcggaggcgcgtacttgcggcgcagggagcggctgacgttctgcgtcgggtaccccaggagctgggtgacgcggctgccgcgcccgctggccttgcacccgggcgcctcggcgtccactctggaaaacaacaggcgggcgcgtgagctggctcctccacggcgcggcgttggcacggcctgggcagagctgggggctcttggcaacctctcatctcccgctcccccctccacctgcccctcacctctctttcactctctgagcctcaacctactctctcctctctgtacattcctgggccagcgaccctgcagctcccccaccccccttctttagaccccacttgtcctggacagctcacggcgggcagcctcagtccggcgtcctcggtccctttgtagtcttgggctggaagggggccttagtgatcccggagctgtgcccctcctttcctggactaaccctcaccctgcgctctggcaagctctcgtcgcccttctgtccctcgctttcctctccctccgtccccaaggcattgcaatcattagcactgctactcttgttctatttttatttctagtttgcttctaaaataagttattcgcactactgatgttaactcttcttaaatacgtatgttgaggttcttgccggcgcaatacaagggaagggtgaaaacacacggtccctgccctccaggagcttacagtctaggccagacagaccgagcgagggatgcatagacgacaggaagaaaggggaaggcagggagtagaggtgaagactggaagcgggaagggaaaagacagaaagccatgcggcgagtgagcaggtcgacatgctgcagtcccagcactccatggcgatgatgggcaggtttggggtggggttcccagccggccgatgacagacaggggtgaagaggacagggcgccggtcccccgccgccgtgcagcagcatgcagcatgcatcaggttttacctgatctcactagccaagtcgccacacgcccctccgccgaccccgccgccgaccccgtagccgaaggcaccgcgggcgccaccagccccgccgcctccgcagcagcagcagatgagcccccagatgcctagtgccaggcaggccagcatgagcaaagagcccagcactgcgccgacgatcatgcctacacgctgggagtctgtggagagaagtggaggcaatcaggcctctgacagatagcctcaccatgtgtcagggcaaatgtctgtgggaaggaacccaggaccctgggaatcccagtgaggaagatgtgggaaggtgaggggtaagagaatctgtagatggcttccagctgctctagacaaaggcctagcctgacagcagtggagaggggacaagctgaggctagcctagctacctgcaatccagccctcccagccagaggactctcaggctgctgtacctaccagagaccttcacttctaccacgcagacgctgtagcccacatggttggccaccgtgcactgatacagcccatcatcatccgcattgatacttttcagcaccaggtccccattgcccatgcctgaaattggaagagcatcagaggggtagtgagacggagaagcctggtctctgagagctctaccctgcccagcccctctgggatgaggacggaataccagtctttaaaaacaaacaaacaaaaaacccaggaggtgtatacaagcattcacaagcccactccactctaaatactcccttcactgagaaagacagggaaggacccctctctcagaaagaagacagtgtcaccatcaactctctgtgacctcagggaagtacatcccgagtctgggtgctggttccctcataatattcaacttctctaaattctaggagcctcacacccttcatggcatctaatcttcacatgccagtgaatggcagttcctagtaagtatttttttttttcatctgtcacagaggtgttaagccacttgcctgagatctaccgccaatcagcatcctagccaagattcaagcccagctcttccttggaccatgttccctccaaattaaccatgctgcttttgactgacatcccatttattccttctctccttccttcagtagcagctgctgggacatgcccaaatgagcagtctctcatagacttggtaccactggcaagccgtggaagtcccagcaggccccctttcccggtcctctacttatcttcactctcccttggctgggccccctcaccttgattgatggagctgtgaaaagactcttgataagaaagctccgagtggaagctgtgctgggagtggtaggacccagctcggtaggggtgactgtgcccactgatcttggcccacttgtaggacaggggctgagagcctccattggcatagcacttcagtaccacatcattgccctttgacatgtggccttcggtccagcacatgggaaccgcaggacgtgctgtaacaagacaggcagttataaacccagacccagccaaaagaccatgccaagctcacagtggccaacccacccttgactctgaagcctggggaaggggagcccagaagaatctggccgtaccttggacagtgacaatgaccttcctggtggccatggtggtcttctttacccgacactcgtaggttgctgtgtcagatacctgcaggttcatgaggttgatagaggcgtcatactggctggggtctgaggctgcaaagcggaccctctgttgcagatgggggaggttgccatggccgatcctcttgtcttgataagtaagaaactgagagaggggtgagagagagagagagagagagagagagagagagagagagagagagagagagactgatgagataaacaggaccaaggaggctcaggtgagactcgagtcagcaactcactgacctctctaagactcagttttctctgctgaaagaatgggagggtggtgtcgggcacagtgacctcttacagaatgagtgtgagctaatggcattagatattctggagaagcataatgtcagacctggaacttctaaagtcagggggcatacttagtctcccccttgatttggggtagagggaggtggaatctgtctggtttgattcctggttggacagctcttatccctgagagatccctcactccctgagagattttggaggaagtttgaggtcttgtgtcttcactcaccttctttcttctccctcaggatactggcttccccatcaggtttggcatcacagagtacacagaatcctgtgccaagcaagcacttaccacattctccctatgtgcaggttctgagttgacttgcatccactcaatgtccagaccattgggaccatagtcctcaggatccaggatgtaggggcaacctagcctcacattgtcaccttctgccagatacatgacctcctggccatccccgttgattcttacagcagacaacagtgctggtgaagagtaaagtaggtgggaagatgagaacagaaacaatgcttgagtagtcagtgtccaccactctgctacctgtcagccagaactcagtggggcttccataggaatgaggggctgcccctccccccctctctctctcccccccctctctctctctctctctctctgtgtgtgtgtgtgtgtgtgtgtgtgtatgcatgtactggtataagcaatacttaatattgtttatttattcatatggcagtctctgggcatccctgtgaacttgtgtatatattctagacttgtgtagatatgcaattgaatactgttttcatacacatagctcttgtgttatatttatgtgtatacactgtggagcatttgaatgtatgaatatatatgcacaaatgtgcattaatgtttaggagtctttgtagatgcaaagatacttatgcacataaccttgtagcatgtctacctgcatatttacatgacagtataggcaattgtgtgtgtgtgtgcgcgcatgcatgaatcaccctaagttgttaaatgttctattggaagaaacaagctgtttaaaagccacctgtatgggctgggtttgggctctatctgggtcaagtgaagtgctccagccagatagcttatccaggagagtggataggatgactcctggtgtccctttttatcctgaaaagcacaagaccaggtctctctctctctctctctctctctctctctctctctctctctctctctctctctctttctctctctctctctctctgtgtgtgtgtgtgtggtgtatgataatgtatgctgactatataagtgcctgacagtgggcagctataacctagagcttggccatgttcatgtgcttgtcttagtctatggcagctatatgtgtagaataagccttgtatggcaaagtgtaccattgtagaccgtgtgtcctccttgtgtgattgtgtggctcccactttcttgctccctttggggcccctcctgccactgagtcagagcaggagcccaaggtttggagccaggatcaggaagcttaggagtaagctcctccccttccctcccctgaagcctcaggcaagttctagccccaaccggttagacctagagaagaataaggggggagtgaacccagggttccaccctagacactcagctccctacctccctggtctctgtaacactccctctacaagcccctcatccagcttctctattgatgtcattttgagtaagcatgctctttggggttccagccccaaatctcagggagcccctccccactcctccatgctcccccaccaccacacacacggttgtacactgtcctgagctaaacaaatagacacaggcatgttctttcaagccctcaaatgtgaatatatgcccatgcagttcccactttcttacacacagactattgggtctatacacacacatttacaggcaaacagagaaacagaatacacactaatctaagacacacccactgcacgctctggtggcttcctgctcagccattcaagaccagacatatctgcagaagccctgagttctgtgtgtagcctggctctggaaaagctagtgagggccttacatttcccccaacatctcagtcatcacaggacctgccctgctaaaccgtggctagcccacaaacacaccataatccgatagactctgagttatattccagcaggaagcctggcttctgggactctaacgggacctggagatgcctcttccagccttaggccaagagaataccagctcattccaaagataaggatcctgatgccatctgccagatcctggggcggcaagaggcaagccagggatgagccagaattcagctgagagcagaggctccaccccagggatgagccacgggaaacaggtgaaggcagggaggattcccttttgccacaccaggtcagccagacagagggtaagtattcagagaaaggggcttggggaggagggacaagctggaaaagaatgccacccgcactagactgtcttgcttcagttgtcccaggccatggagcctcaccctagctcctcagcctcctcccaagggttccagcctttttgtacctcctcccaccccttgggaagttgttcctggcatatcaccctggtctatcttgctgtgacactggggaaggatttccagggaatgtaagagaaaaaggcagcttgtgtggcgggaagagccaggatggaagtcaatgtagaaagagacctaggcaagactcggggagagagggacaaggggaagtcaagaggctgtccaaggaactggtgattgtcccttacaaaatcaccagggctggccactctctgtggggaatgccaccacgacaagtgtctgaagtttcaagctgatttcagactgaaaggggaagagagaagaaaaaaggcagctcagaaagtgtcggcgcacaactccacacagtgagcatctagcccacataccctcacacacacagcacacacagagatgcccctggctctcctggcacagccagggcttcctgagtaggcactgcctgagaagccctcggcagagaaagggtgcaacaggcttcttgccagaaatgcaaccatcatgcatattcgcacacacaggcattagtattacaagtattcccatacacagaaacagaacgaaacagtcccccttcctcccacctttcttccttcatctagaccctaggaggggctccatgctattttcaatacttaatagactgtcccttactggaactttcccagtcccaggcagggagccatagtatccaaacctgagccctgccttccagtagtgctccagagaggtgaagggggctctgggaatttactatccatcctgtccacatcctcagcctcatcccaaaagaggcatcacctgtgaacactcacagcacatggggcatggaccggaggccccaggcctgagttcttgttggctaggatagagacagcccagcatgtggaacccgttcaaagcaaacagctttctggcccatttctttggcttgggagaactggcccttccactgggatgagcacatcacaacctgatgtgggctccgcctcagcccccatcctgagctgctgctattcacctgactcataccccacctgcaattcccacaactaactccacatctccaagcaagccctgtctccatctcccagcatgggaacatcacaaagggcacctgcacacgcatatgagctatacaagctgtcaatcacaccatgaagatctattccaaggtctctgcacacaggcgctgtcccaagccttctggtgcaggctctcctggcggggggagggagaagctccctcagcagtatccaaatcagtgtcagcaaagtgaaggtagacagtcgctgccagtgcctcttagaccatctttgagggtcttctgggagccctcgctcatccctgaccttctggcgtaatgctgggcatccctgcccctgcccagccccgtacctgggctgaggcacacgagtagtagatggaatgctcctccaactcccatgtctctagtcttgatctttcctcggcctgagctgggctccagtggactggtggtggtggtggtggtggtggtggtggtggtggtggtggtggacggggcaggtgaggggagggggagcggagggcccagacactgcccggggtggcaggaaggtgcagtgagtgccaggctgaggagcagctggagttatttctataggagggagggggcctggtccccgccttggggaggagcccaagtagccctaattagcagggtgacaggatggcctacccaggcattacccagccctcacccaagctcttccctgtcccaagagtacttcactggcgaccagcgggacatgtaattaggtacctgttaaacctccacttcctcctggccaagtcctcagggtgacggcagttgccccattttacagcgtccacagagctcccctcaccactcatttgtcacctcttccctggggggaagtgggaaagaggaagaagaagccagatctgaagagttaacactgaccaaagccaccccagagcctcactcaccctctcattgcacacccagaatttcaggtcccaagtccttcaagcaccccttgctttccaaggagacccctcgaggtcaggtctaaacaatggtgcaccagagaagggactcttctccctagagggaaagcccaggtaacaggagatactggaatgtagcttttctctgtcccttcagagagagtgggccccctgggctgaagtgggaatgaaaaagtctgtgtaaggacagggtcttcccttgctgctgcttctcctctgctgacacaaaggtcatccccaggttccgggaccccagagagcaggaggtgctatgaagaagggtctagacccctacctctcacacaaatctaagtcagttgaccaaggcttaaagaagggggaaggaggggtcagagcatttgaggggagtgagggactgtgaagggtgggcagggcaaaaggttatgtgagtgtgtacatctcttgaaggcatgaaggcaggagaagggctgaacccccgacccctaccccagtatgctttcttcgggatttcttggcatctcagccaggccctgaaggtttaatgcaggcccagtgttaacaggggtcataatcccctaagaatgaagaccctcaaaaagccggactgtccactgggcaactacagtcatcaggtgactaagccatcccagttctaggcagttaggttgaagctgggtgggagggtcttagccagcagatggggaaggccagccacagttggttgatctatgagctcagaatggttccttaaccttccctgaattccaggactgtccaacaggaaaagtcacgagaagcctcattccacagtttggctccctcaagggatcccagagccttctccacaactgacctgggctcaggaagggcagcgggggaagagtcttcaggagagttatggggttcgggaatgctgccagggccacccccatagaagaataagacagaacaataaggaagcatgaggagtccacgcagctctgtgtcccaaatccttttaccaacaataacaggttgctcaagggcccacctaatacacacagtagctatccttattttctattctattttgggatttatggagttgtcctgagccttctggaaaacaggggtcatcatccctattctacaggttgggaaacagaagcccagaaaaataaacattcggttcagttgcagctactggctgagtaggaaatagctaggcatgctgactctcagccccaagtggtcccgaagagggcttggtagccatatagaccactacacatctgaggacagagtagaaggtcagtggcggtggaggggaaagcaggcagggccaggaagagagagagagcaaatggatagagctgtggttccactcagctgaggtgtagggattcatttgagctctggatttgatctaatgtgacgtgatgggtgcccctgcggttaaatttggggttatttgaattatgaatgaggttgaggtcagatctgaagatgggattaaagttaaggtcagtattaaggttagaattacagctagaagtacagctgggagttaaggctgggctttgtgttatgataaagaatccattttagtgtcatttgcaagatatgcttaggaatacggttgagataaatcaaaggctgggttgaaattgattaaggatttgtttcaaatgagtttgaattaagtttgagatttaagtcaaacgagagtgcagctacgggtaaaacacaggcaaaaataaatgctcaagagggttcaaggttatcaaaagtaggattttatgatatagaaagataccaaccccctcctgctaagtccaggtttgactcagctctggtagcatactagtggtacacacagatagagccaatgtctgagggagggactcaaaagtgcatgagtccatatgaaaggggatgaagcaacttaatcccacaacaaatgtaccctctgaagtcctgctctaccacctgctcacagcctaaggaagcttccagatgcaggaagctatgagtaaccagtggagttctgtcgccaaaagatgaggcccatcagagggatttactggggaagggactgtggagtctcaaagaggttgaggggctgagaaagaataaagacctatcaataggtgcttctaggggaaaaaaatacctttgaggggatcgtgaagggtatccaggagataaaaataatgcaaaggtcatctttggtcccccttgacctactgaaagctaattgtcacctgcttgcaatttggagcctataaaccaagctgtaggtcttcctgccctatgccacagggccttgggcgtggggtgatggtgtggtggggactggcctgcagcccactgcctctctgagcctcaccctcagaaaaaaaaaaagtgtcccactcctgagcggcacccttctctaactcttcctttgccttcctctcaccatctgtctccaccctaaactaactgttttcacccccccacacacacacacttccttttcaaatcccataaaggtccaggctggtttcagaaaatcttggacttctgtgtcaggacagggcaaccaaactcacttctgttctgagacagaaataagtcaaaggtgaaaacccaacaaagacagtgaggagtggaggaggccagaaaggattcagagaagccagcaccagcttctgagatgggccacagcccaaccccaggtccctttagaatacaggcagtctcctcatcctcagcaatttcacataaacccctagctcttctcttcctgcctgacttgccccagctcctccccaggctccctaggttcaggctcaggaccccagctgactcaggactacatcctgagtcaagacctccctctctcacagcccctccgcccccttccaggcctccatgtacacctagagctcacctcagaacatctagggaagagttacccagcagaggaagtctctgaggagtttgggagcaggagttaggaactaccacagaaagacggtgtcatgtaagactcaaagcaagatggtcacagagaacttgcattctggatgccaagggcctatggtagctgctgacttctcaccaaatttgagtgaaggttataggatgaaggactactgggtgaggccaaggtctggggttcagagattgtgcaggtggcatgagggaatcactgtaagtctaacaggatgagttagagtcagatgcaagaaaagcagtgagttctgttgtgagtgcttaagttttgaaagtgtgggtgtgaggcaggggactgaaatacacaccagggcttaagcaatcttgaagcacagatgacccaagattatctgggcccatcccccagctcctgagtctctgtgtttccactggctcacctcagaaagagggacactgcaagaggtgacctggctatacccaaatttctcccatcaagcagtatcctagggctgattgtagctcacacagtcttgacttctgaaggagaggccctgacccacaactttcagcaaggctcaagagccaagagtggttgactgaatgtcttcaattgaaatgtcagggggacaagcaaagttgagagggagtcccttgtaaagagtatatggaatcctgatgacagagctgaggaagaactgagaagccctgaagataaacacctcacagagttcagctacatctccatttctcagaccttcatcacttccataactactggacttcatgcagaatggaggaggagcaaaggagactcaactcctctcccccagcatccctcccgactgagagacacagaccagcagagggacacttagcccatggtatgataagctgtgctaataaaattcacaaggtcccgtttggtggaaatgatgtttaaacacagatcataaaggttattgatgatgtgccatagaaagaactggaggaccccagaggtgaccagagttatgtctcagtgcttgggaagtaagccaaggtcctgccagacacaattcagaagaatgaacccaggagtgacagctgatgattcttcttccacggagtagataagatccttgagaactaaaccacttggaagcttctactcaaaccctaagagtacttcactgggatcatagccaggtcctcgggaaacagtctacagctcggattgattggcctggactatgtcccggtgtgaagacagattttgtgatgaattaatccatatattccagtgggactttggcttttggacttgtaggaataaaattttcttttgcttcaatacttggatttttctgatcagctatcttcaaggggaagctgtggtctcctcaacccccagggtggtcccaggcttgtcctgcccagagaggtaggaggtggagagacacatcggaggaaagctaatacctggttcatagctttccccactaagcctgaccaggcaggccctcactctgccctccctgtttgtttcctgttgcctggataccgggataaaggactgagtgaaaagaaggtggggcttctccagctctgccaggcctggctggagagggaagtgttaactgtcaggagagccataagccctgcccaagggtaaagaggaagcctcccctcctcccccaggttcctccttccaactcttcctctggaagcctctgcagagccctgtgtttccagaaccacaggcactttcccacctgagcttcacagagtgacacagagggctttgttcttattgagagattctgcacctgtgtagttccaaagagtgaggctagggctgcgcatttgatgcgcaggaagacacaggtggactaaagagcttcctgagtagcagggccttctctggggtgactgggttccactagcaggtaggtagtgggcatcctgtcttgggcaggggtgggcgggcgggcgggcaggcaggcagaggatgcaagccagactgtccagccgtttggctagggtttacaaggaagactggaacactgacagttctctgaggtctcttctagccttagctctcatgatttggtgctcattcccattggctaatgggacaggctttctccagcagccatgtaggagattatatatattatatcttgtttcttccagaccctcctcctccccatcttacttcctgtcatcaccttacctcctctttctgggaatctgagaaagccactacctcagctccagcactgtcccagcaccaaagtcatcagagccgttgggacaaaagccaccctttccaagaggaatgtgggtatgaatgcaggagtttctacctcaagaggcataacccagcaagcaaagacaagagcaggagctgtgggcactagagcagagaaagggggtgaactatttaagggcagacaaatcaatcttgaaattcaggtatgccaggtaagcttcactagatttcctgggatgcatcacagtgtgtagaaagggatgtgggtcacctttagacaggaaggggcctgaggtctctagtgagcagttgcctttaccacggggctcccaggattcacaagaacatagcaggaggggtgtggtcgaaagaacagaaagtgaggagctctctgtccctaagcctccaagcttgtgtgtcagacttcttgtctgacacaggccacctttccttaccccccaaaacacagtggggcctttgaactccaagagcccctttcatccgagcctattcaaaatgcttttactgggaccaattaatgcccagctgtgaccaaagtcacacatggggatgctgaagatttcagggacatcccagcaccccactgagtcagggactacctggctaggtcaccagagccggcagctgagtcatgcccaagtgcagcaggtgcaaagttgagagaccgcccccaagccaccgcagagcatggtgtaggcaacaggcttctgcaggcaggtagagcccaggcaggagctggggctcatgtgcccaggaggcagctgctgttacacctaggagcccagcccctgagtttcctaggctggaccaacccagtctgacatcataaggtctgaaggattccagaggcataagctgggttaagaaatccttggcagctaatatatacctttatataagatataatacataaaggaacctgagcctggtgtggtggtcaatgcctttaatcccagcactcaggaggaagaggcaagtggttctctgtgagttagaagccatcctggtctacgtagtgacttccaggataggcagggctatgtagagagatgctgtctcaaaaaacaaaacaaaacaaaaacaaaaaccaacaacaaaaaaccctgctttaactaagttactaatagtttagccactcaaacacacaaacaaaaacaactgtacaacaaagacaatgcaccaacacagaacacttcctacttctttcctgatcacacacacacacacacacacacacaggcaggggaacacaaagctacttgtgtctctgagcatgagggcagctgaagcctcactggctgaaaaagctcaccaaagggccaagaggtgacctttagaggcaaaactgagtctggtcatccctgattcctgagcccgaggtgctagacccctcaataccacacctttttgttccccactgcatttcactcccatcctgtagactctactcacccatcttccttctggcttaacggctgctgccatagacagacccaccagtccctacttcagccaggtgaccttttttttaatggaactagtccccctgccaatcatcattaagagagctagagaggggctggagatacagtttgataatagaatgcttgtctagcatatgtgagggcccacattcactccccagcaattaaataaaaaaacaacccacagaaaaccttatacggagtgggtagaaaatttatacaagataacactatggagccacccaacaccccaacagctttcagaaccctcccacttataggaactgggatccagtggatgagccaactgattgtggaggttacggacgtggtgaaaggtctatcatgaatcttgagagaagagatcaaatccctccttcacatcatgggccaactctgacatttaaaaaagttagtgggactggagagtcaatctcttgtgattctctcccaaaccatcttcacattcttagttggctgtagtcctttctgcagagccagacctttgtccacatggcttgttcttttcagctctgggaaggacagcaggtgtggaaccagccaaatactggggaccaaggatgtttctggctttctcaagaaagaaagtcctctggaaaagatgaggtttgttctgtggtcccagcaggtatcgcctggacaatcagtggtgccagtgtgccagctagagacaggctagagtccttgatggcactaccagtgcttttctcctagcctgagatgggtacctcatcctccaagacctttagggaggaatgtataaacttctttaggtacgagggcaatgagttaggatgctgcaaaaggaaggtaaaagagtcttttctccatccaatggagcttcccaactattgtgtgaaagctatagtcttccagttgaggacagtggagaaggtgactgggaagccactggatccgaggaaacacaggaagcagcttgtgactctccttgggccctatgaaaagaggactcttgccccaggcccttgtaacctggcattgtaaacacccaggacgcaccaggcagctgtcctctcctccttagtacaggatgcatggaggaagacaagactggacactgaatctgggagatggagcaagtccctggcgatgggggagccaggcactgcagtgatgattttagatggatggagaattatctccatcattgatggtggcactccagtttaaagtggaagacttgatacccaggggccttctaaaagtgctgagaccatcctaaagatatatgaaagggagtggagctgaggaggaaatcggaagcccaatgagaagcttccagaaaaggggacccaatctattgtaaacgctgagtacctcaatggcagatggcataacaagtactcagtgagtgcctgaagaatgaatgggtacgtaggagtagattggggcaaggtaggacaagttaaaaactgaactggctttcaggaggcccactcgtggaattaggtgaactgacaataacagggccaagagtgagggtcagctgtatctggatgaggagctgggtcctgggtgtgcctccatgggaatggggcaaatgtctgtgctgcagtactgccttagttaaaagggtctaagcaggagaggactgagtccagaacagagagtccagggcgcacacaccgccccctccatgcatgtgatctgagtcacaattaggagcccaggataagccaatctcagctattcatgctcctccctctccagctctgcctcatgcaaacctttcaccaatgctcaacaaaagccgatctttcactctgcctcagtgcccccaaattcctatgaactgggtacaggaccagaagaaccccccactagagcaccatgtggttccagactctgagtggcaggtcagcacacactcgggtcccctgtagtttattttgatccaacttccgtgcctactggaatgcccatccccaccgcagtaaacctgagtggttcctcagaaaatagaatagctttaatctgttactatgaaatgaggttagcagcaactgtggatgccccagggtctgggcggaatctgtgccctcccaaagcccataacatctccccttcatttcacagaagtggtcggcaggatgttggctttgcgctcagcctcgatgcagtatttctcaggaaggccggttgctctgcagggagaaacatgggtcatgtataagtaaggtgctgaccaaacgtgtgacgggagaaatcgtgctctgagcctccacaacctggggccctgtaccctagcctgttcctaccatctacccaccaagtagatattccagtcaaggtcctaacatactgctaaggagcgacccgttggccaacaagacccagtcccagaaccttctgctagagccccttcagacgacaagcctcaggccggaaagcctcccactaagctcctccttccgcagtcatggcttttccagtctgccaagcgattagagaaagaaaggaacccggtgcacctcagctcttccagcttttgcttcttgatgtcattaatgcgttcgcggcgcttctgggcttcctccttgaggcgccggccctcttcgaaggtactgagccggttctgcacgtgcttctgctggttctcacgcacctgccgccggagctcgttggcatgctgtagggaccctgcggcctttttctcctgctccaacttctccttctcaatctgctctctctgagccctgggaagggacaaaaggaatgcaattggctgagctcctgggtgacccttaagtggccatgtttcgaagtccacagtcggccaacctccaggcctcaggatccagactataaagggcctaccatgtgctctcctctggcctgccagaaacagacccatcgttatctatcatagtgttgaaatgcttaataatttctaggatgtttttcattgtattttatgtgtatgggtgttttgtgtgtatgtgtgtttgggcaccacatccatgcctaatgccctcagaaaccaaaggagggcatcggatcccctgggactggagttacagacgactatgagttgccatgtgggtgatgggaatcgatcctgaatcttctggaagaacaaccagtgctctcatctgctgagacatctctttggccctttagtatttttttttttttttaaacaagaatccgcaccatctaactggactctaaattctatagctgggtcccacaaccagggtttcacccactgatagttctccatactctccctgctaatgatgcatgaaactcctctccagctggatcgaagttctcttcctcttcctctctgatgacaatgacatcaacagaaccaaacaagagtaaggaaacagcatctgtaatgttagctctacttcttttgctgggagaaggcaagaactcacagtctgacatctctgttcccttactgatcaatgtcttcacattccacctatgaatgtcttctatataagaatattcttctacaagaatacaacaagaccctaactaatatcggggaggacatctctaatggcatgcagagaccctcaaatgaaatatatctcgaagaaatttggttagaggtcatctaacctagtatcagattccttctcaatacattcaaaaccaaactgcaaaactatcttaggctgcaatgtctcacctgctttctccacagtctcacctgtcccaaaacagagatcgtttcccctcccaccaccaccgtccactgtcgcttattcatctcctcactgtcttacaaaatccaccccactcggggaacatactcaggtcctgacagcgcctccagccatgcaaatgtctcccccacatcccacacctctacggaacctttcccagtatactggaagggactgctggcctctatgcccctctgcagttagacaccaaatgtcccacagcccacacaactgtggcaggagtgtacaacccctgcttgtcatcactcccctgtgtgtggattagtttcctaatgtttctcgctcgtctcagagaaggagtaactgtggaaaggggagagctgtatgcgccactagaaagctgttaggatggtgggcagttgacaatccacatgacgaaggacttagttaacctttattgtcaactccactagatcatagactactcccctggacatttctgtgaggggatttccagggcggtttaattgggggggcgggggggggagttgcactctgaatttgggcagcaccatcctgtggactggggtcatagactaagaaattttagtggagaaagggagctgagcagcatggttcttctctgtctgcctgcccccttatttgtgttgttttggtttggtttggtttggtttccaaaacagggttttactgcatagccttacatcaccacacctgtctttctgtctgctccttgactatggatgctatgcgacctggctgcatggcttcccgtgctatgatggattgtatccccctcaaaccaggagccaaaataaacctgtccttaaattgctttcactggatattttgtcatgacactaaaaaaggtaactaatacactggtcatagcacaaggtgaagacaatagtcgtggataccaactgtgtgttagaatcacctacgagcttttcaaaagctgcttgccccagagtgtttaagccacaacctgttacggtgaaaatctgaatgtccatatttttcggaagtgctgacttagctctctctgctcagtcaccagactaaaagctcaagaccttctacccagaagcaggaagtccctatgtaggctgtactggaggtcatgcttttgaactgagaaaatacgaattgctggctgtggcagagacactctgggagtgaagacatccatcatgggagtcacatggtttggagacactaggtctagatgctaagctagggcagcaggggaagttggacttctccaaagggctgggccagctttatttaatagctggctagtgaatatgcttcaggcaaacagagcaaagcagagtcaagtgggtcagtggcaaacgtaggacttggaattcatcccattaatatttattagtgcctgccaaaggcacacagctgtccaagggcatggaggcagggaggggggggagacatctggaaggcaatctggagcccaagggcaggttctgtgggggatttaggaggctgtctccgttaccagatgtccagtgaccacagcacaaccccaggggcaggaaaatcgggggagacaaaaggcatcacagccagtgggaacaagcaggggcaagatcctctgcaactccaggaatctggttctggcgggagagaggttctacggatctgctccgcctccactaggggtgcaggaagcctggcctgccttgctcctgactgagacagttccaagaggaaggacccaaagcccagccctgaagatgaccactgagtgctaacctgccttgctgtgtctgtgcataatttctatgattgcacgttccccaaactggaattttatttggtttgtctccttgttgttgtcttatttgtcaaatcttattttacagaggttgaaacaaagcaaaaaaaaagggagttgttcccagtcggatttggtctggtggcacagatgtgactgggagaaaacaacagagaaggaagcccattgctctgagggaggatgagaaggctgagcagtttaagtcccgggcttctgtgtacacgctagaatcatcattgaacccaaacaacaaaggataacgataagagctgccaagcacagggaggtgactgtagatgatgtccacccagctagggatctctgaaagctttcctatggagcaggcaagagcagggcttgatacccagacagagtcttgaacacatgttgcttaacaactctgggtcaaatcaatggcaaagactccccctcagagttcggctccagtggcacaacccttagattggagtttaccctctgtctcccctgggtttctcctactgcagtttccctactttccccagggatgtgggatctaggggaggcagaaaagaccacatgtatacctttatttacatctttactgatgcaggataaataacccttagttccttaaacgcttccagatgctattttccagttctctaatcataaaatttctggctcgaatggctttgaaatatttcagccatccatctagtcagagtgattgcagcaacgtgatcaagatggaggtacacttgcccgctaacacggcagaaagctcctctccatccaacacacacatactactccccctgagcacacagttctccttccacaactttatcaacccagggaaaggaagccagggttctctggacccctcctaccgaaggatcctctcgaactcatctcggtcccgttgcacctgaacggccaacatgtgttccttgaaagccacctgctccagccgggttttgcgtagcttttcctctatctccatcttcttctgtaccttttccttttctttctggcgccattcacgatctgcaacctcctggttgcgcttgtcccgcaaggcgtcctgagaaagcagaccgtgggacaggggagaggtggatgaagaatgaaggtaccaaaaaaaggaggcagagccgctgacttacagacttcagtttgttcaagaagctccctggattcctctggcagcaaattgctgccaaaagaagaaatggaatcctggcatagatctttggggtcagaatattttctgaggggtcaccttgtcctgcctctctcatctttagtctttccctgttcctcaagcacctccaggcactcctagaattgcttctaattttaaaaactgctaatgacagggatgccgaattttcctctggtgacatatttcattagtcagttaaggttgaaaattcttctttgtgtggcagtcaaaaactttctccagaacctgagtgcacacttctgctctcccgctgccaccgaggacaatggggacaggcccacccttccttcgcaggtggatttttcagggtgcatcccatcattaagtgacatttgtctgcggttagatttggaggccactttacaggctgtcaaggaacggctacaggagtgggagggacaaaggaaagccaagaggaagaggaagtggatacctgctctgcccggtaatcttgggccttctcctgcatggccctcaggcgggcaatctccttatctttctccctccggactttttcctgctcagcctcaaactctgcttctcgggcctgccgggaagaaaaaggcctcatgataatccacaggactgcagctttgcacagagaaacacagtctccacagtgaacatcccttccagcgtctccccccaccgctccttcactcttatctaagatggggagtgggaccttaacaatgggcaaacataaggaccgctagctagcgttggtaggagtctttcccaggcattgtcttagaggtcccaggcagcctctcaagagacagatgctgtgggtgccgaaattgatctgagcacaggaatcctgagctgtactccttccatcacactgaagataatttcaaggtgtaaggccaccggagccaagtaacaactgtggttccctgctggccttgtaaagcgcagtaggtggaggttgtctcattagtcaaccctatagatcgtgtcccacctccacacccccatttctgtgccctgtcaccccaccaccacctcccctaaccgcaaccaagtttttggcaatcccacagtgcttaacagattcctcgagagcgaaccatcaaaatgtgttccttttaccacctctgtgaaagaacaggagtgaacattccccaaatttctacaccactgcttctaaaatactcacatgaccaccagcacctgttgggtagcaccatgaagatggtcccttgtccctcattacactacctgcccgtcctgccaagaagcccagtgaactgcctgcctgggagtcgtgctccactgggtctgactgattcctctgcctcattgtgccctggatggcaggggcgagaattctagatgcttccacaaccaccctctgcctctagtcctctctgcctttaggggcagtgccaggagggtgatcacaccttctgaaaacacagcatagagaagtaggatgtgtctgttgtcattacaggactgcaaatttgcagaagagactggatccgcacgcaaagaagtcatctttctgtcgctttgagtacgtcttcctatttttacataaatccacattcactctgaactacacttaaaaagtctatttttctaagtcctgcactcctcacgtaccccaatcattccatcattcaattttgtcccagaatgagtgagtccacacattggggagctctatccatccatagctgtctgaagatattgcttcctgggaggcaactgtttttaatatccaataccaaatgtcttatataagagcctttaccaaaaagaaaaaaaaatgtaccttgaggaattcacaagaacttcactttcaccagtcgctttagttttctttaactgcatgtgaccctgaccccgacttttaaatgaaggctttcatgaaaataatggtatactggttgtgcggggtgtgtgtctctgaagcgatccacacattcttattgagcaagttatctggccatgataaagagaaaaagaagccaggcctatgtattttagaacgaagacatggctgtcttctgctagagtcccattattgctcaggtctgttatggacatgtcactcctgggcataggccccagcatcagacaacaagaacctaccatcttcttcttggtgaattccatcaccatctggtctgccagtttctcctgtgccatccgctctgctttctgtttctggttttcatcgttgatacgcttaatttcagcttgcatcttcagcttttcctgatgctgccgctccagaccctgccggcaaaaggaagagaccctcagagtagaagaaggcaagacaaaaaagctgctggcatgttgatatagagagagacagaggcaggaggctgccatcaccagcccagattaaagctgtctttcaaggttgatcaataagcaactttgctatcaaatagcctctttgcaatcttcatccacctcaacttggtgatggtccctgccactgttatctctcgacgatttctggaaacagaggtcttaaaattctctccctcttgccatgctaaagtctacccctgtaacctcatgagctaccaccccctggctttcactttccttctcctataggaatgcaaattcaagcagtgatcattcagcagtgatgattaaaaaaataaattttagttgggcagtggtggctgacggttttaatcccagcacttggggaggcagaggtaggaggatctccatgagttcaaggccagcctggtctacagatcgaattccaagacagccaggactacagagagagaccttgtctcaaaaacagacaaacaaacaacaaatgtagctcaaattgatttgtttccactcactgggcagaagcagaagctgtttaccaggtcctgaaaggtgaggcttgcaaggatgaaaaactgaggtccagtggttaagtggcttccccaaggtcacacagccagtagactctgcctgaattaacatttctgccctctctggaaatcttactggacaactgtttcagcttttggttctctctgcttctgagttttctacacttgaggctggtgccctacctttgggaggtgaccgaatctccctttcattctgtgcctgctagagacaggggaccttgtgtcattcccctccctcccccaacagtgtgtagctcaatgtgaggaggacaacaaatgcccaataaactatggctaaacaaagaccaaagcaaatagtatgtgatggggtgggggggtggggggcttagacaccgaaccacagaaagcagagtgccaattggagcatcaagatcttttctaaagagaaagcttctatttttccccacctcaagcccccaaactcaggtacttttaaaccaggttttttttttttttttttttttaaagactgggtcacactactgtaaccctatctggcctagagctcccatagtccaggctgtcctcgagctcacagagatcacctgcctttgccccaggagtgctgggattaaaggcgtgagccaccacacccagtgtattctgcagtcacatgcagagacgctggaatctcatgcagctggctgccatcacctccaatggatctcaagctctgcctcagatgtcttcccacccacccaccccgcttcctacactgcttccagctccatttcttcaaaagctgaacctccccaaagcctcgaaccttctctgcagccccagcttcagccttgatcctctcagccagggccttgctgccgtcagcctcccccagggctgctctctgccaattccgctgctacccaatttaaggcttccctgctccaggaggcttcctggccaggtccctacagcggctctgcggttgcaggcttccctcactctctcctgactcttgtagtctctcctcgtttctttccccacaccacttttcccttccacccctccagctcccacacaacccccccctcctcgtctccacgccttcctttccagtttttgctcaccggttccaggattctcattggtagcccccacattcttcacactgaccctcatcgctaagtaagctgtcacagctgatggagaacatttacataatcatgtatttatttgcttcgctgcctgtgagtttactcttcgctttgttgtttttgttggcttgtttgacttccacggaaccaaagggactttccctgtttcttgtcattgaagcccttcaaagcaacccagaaaaactcccttgactcttctccatcttgctaacaacacggtgggaagagctgtcctgctccccgaagtgctgacaagcaacactatggctggtgaggtgcagggttctaccctaaacttgcctaataatacttcctggagccttgggagtgtcttttggaaggacatccaaaggacagtgacacattagtgtaatggcattgactcactgactgctggaacttcccagcgagcccaccgatccccagctccccatgatctaactgagttgcttggtcttttgtttcccacgtcattccctgcatatttttcccacacctctctttcttgtctctttcccacacttctcccctgagccagtatcctagctgggtgtatctatcttcttggtctcctttgcaagccattcacaaggctacaagccccctcttctgccccccacccccacccagggatctgcagcgaactcttcacactagtccttatactgtaggtactctgagaacctgctgatggaacccttaatggtccccagtcactcaccaacacccaatgtactagttgatgacaactcaatcatccatgcacatggggtggtggagggagggacaaaaagtaaaagaccatgtgtcctaatagttaaatagcatcgtgaaaaaaggaatctggtacaggaatgctgttagataagaggaataatttctggtgttctgtagcacagcaggataataatagtcaacaataatttcaattgtacatttgaaaatactactataaaagattctgagtgttcccaacacacacacacacacacacacacacacacacactggttatctgaggtggtgggtatttggatcaccctgatctgaccattacaccccctacatatagaactgtcacactgtagaccacaaatatgcacaattactaggtgtcagttaaaactaaaaagatattaaagaaacaaatgagggaatgtgtctagatcaaatgtttaaccatccgcagcatgcaagccttatttagaaactgctttggaaaaagaaaaaatagctgaaaatacatttctgtatcaattaaaactgaatataagttaatagtagatgatattatgggatctttggaggagtttttgatggaggctgtgtgccttttcttcagaggttcagggtaaagtacttaatagcaaagtgtcaagatatctagagccaaaagtagtttaatcaaatattaaggtaaatggttaaccactaaaccaaagtgaagtgcttctggatatggttacaattccttcaatttttgtctgtatgtaaagttttcaaaataataaaaaaaaaatgggtgggcaaaggggtgactatgatcaaagcacattgtatagaattgtccaagggctaatcaagttttaatgtgtgtgtgtgtgttctcaaacgcttgctacaggactagtgacatggctcggtggctaacgtgcttgccacacaagcatgaggaccatgaagactggaggttagatccccagaaatcttgtaaatgctgagtgagtgtggtggtccacttgtaattatcgcctgagaagacagaaaaagatccccaaagcaaaccgggtagcaagactaggcttgactgagagctgcctcagtggataaggcagaaaatggatagaagatgattccagacatcagtctggggatccccacacgcatgtgtgcacacacgcgtgtgtctgtcacacgcaaaggcattcgtacctgtagacacatgtacagtctgtctttgcttcatgtattgaagaagaccagataaggcaaataaaagagtgccttaaactttataaagttcacacaggtatgtcatccggtgttttattttgttttttgtttctgttttttttttctcataaaatgttcctactaattttatcgaagctaacagggataaaaggtttagcttcacaacacaattaatgacaatgggatattgtgtactctgaaagagacaacagcagggagtgggaaactaaagtgctactgttcatctatggagtgtataatttccctcagtaactggggaaaagactgtaaaacatccctctgtttacttgggcaaagggcatgcaaccatatatttcctttatgtgtctgttcacattgaaatgccagtctcagaccctaagtccctgggaggcaaggacaatatttatccaaatcacagcttatccccagcatgatgccatggccaaacaaatgcttcagacggcaattaagaagttgatggtgttgtgcaaagaacgtgtgccttgtcagaagaaaatcactccataccctaagccccaaaatcctggagggctttgctgctggtacaggtgaaactcagcatggcctggtagcctgttacctgcaaatcctcctcctggagccgctccatatacgccagcatctgctccttctcctgctcgcggtgctcggaaatcagcgatcgctcctcttcgttcttttttatctgattcaagatgtgccgctttcccctgagagaaaacaggaccagagtggctctgaaatcaagaggcaagtttctaccctcacttctacccaaataggccccaaactgagaggtttcacaagcaacatgtgacaggtgaacctttggcgtgcttatgcttcctgcacctaggctaatgtccttccctcgagtgcctgggtgataagccctcagtttgctgtgttctactttcagggtatccctgtattaaattcctctttttttttttttaatctgtctgcacagaagttaccttacatcttaaccacctctcccttctagtatttaacaagcttctggaacctagctttttttccaccaagttgtctaacgatgtgggaagacggcttcctcccccagcttcacagaactttgtagattttcaaagtccaggatctctaattctttcagtgtttctcctctgttgtctcccaacctgactctcatgcctactctgcccactgtctttttgtgtacatactcacactgaagactctcggctgctgatacacagggctgaaccctgagctccactcagcaaagtcctcttttcaacagtcaatacagggctaccgactctacaatcagtgctccctgctgtacacccccagggtgctgcaagtatgtcagtaaacttggaggcacctagagactgtgacatgagtaaaggctctagggatgggagaagacaaagcagagagatgaatccagaagaaatgttaaactcatattcagatacccttgtgatgcttcttgtggcccataaaggaaggaggggcagaaagagttgcctggaaagtgggcttgagctcaatcggtgtaaagattgggtcagggcactagagctgcctaatgaggtagagtgttccttctctggacctgcttataaagacattgtagatgtgaagaggagtgtagaccggacaacaggaaacactgagaatggacgtaacgttggagcacacagagaagcacctactacaatcttggaaataagctttacagattgtgtgagtccctgtgtcgttccataggggatgagagacattggagcctcacaaccaagtctcagctcttccctcttcgctaggctacctggacttgaagatacacggaaagagagctgaaaaacgccagacccacgtcttcacctacctcgccatttcctccttcctcttcctttcccgatcatggtgcctttcaagggatttcaaccggtctacttccatcatctcatccaaacgcttctcctctgcctccagttcctttcgtatctgctgcttctccaggatttgggcatcgcggattgcatggcacttggcattcaggataatctagggagtggggagaagattgtggtactaggctttggggggcagggtggtaagattaaggaaggaggagttatgagtgtgtgggcatttaagggggaagaaatgggagcagaatgtgctggaggtgtgcagtgtccatcacgagttcttagaaaaggttccttttatttttcactcactccttaacacagtatagttcaaatatttactgggctcttattgggcactaaagtttattcaaggagagacagaatcactcagtattgtggagctggagaggtaatgggtcagccttccaaaatatgatgaaaaccacgacattcacctacgtagacacacacaaaaatctccataaggctttagcagttccttcgcagggaccagtgaacaccatgttatgcttagaggagccaagatgtccaagcagaaatgaaaccactagatttttttaatcaaggagatcccaggtgatgtaaaagaaatgagaaaccgtgtgccatcattaagaaccaaaaactaagagcgttgggtaaataaaagcaggtacaagtggaaaagatttacctatgagatggaattcagagatgaaggggctggggagtcaacgttttttcatttggtcaataagggagccacactcaatggaattacagaacagaatagaattacaaatgagcccctgacctttatgctccctgctaaaagaagtactctgcccacttcaaaaagaatcctattgtctccatcaccatccggggccagacttgaactaacaggataaaaataaaagtgaggtccttatcaatgacagttcacaaaagctaccccgtatcttggcttacttaatattgtcagtaattctgctaaacagtgttgccatcactgtttcacacatggactcttgagtgaggctcagggagagcaagtgacttgcttgctctagtcatccatcaagcagggcaagtctcctcctcctcctcctcctcctcctcctcctcctcctcctcctcctcctcctcgtcacacagccccatggataactcagagtgtcagcccaaaggctcagggagagaagagattctgggccctctctttcgcctcctcctccaggtcactcagcttcttgttgttgctccaggccatttccttctgcttcatgatcttcttgcggattgtcactgcttcctaagggacaccagcctggattggtgggagttactccctgggaacttgtctgccacaggtaacctgaggagagttctcctcagtccatcactgtatcagagcagagaggtttcacagcccggcgttgctgtctttctccctgtggcccacatatcccacccatctctcaagaatctcctcccagtcttcattgcctgacatttcccgtctaaatgagcatgcacacctcattttaacatcccctgtgccgtgagaagttggcttccccactccactcttctatcctgtcacccatccaccaaggacaaagctatgaagctgagttaccaagatggcttccttctccttcttgaaggcctgctctctggccaccaactcttctttggtgaggacatgggatgcccatttgattcgctcaaactcttcagggctgatgatcagggattccccagaggggtcctctgtgggaacactgacacaggaatgaccatcgttagggaggagagcaggctccaagctccctcactctcttctccaccccatactacgctgaggcaaaagaatctgcaacttcatggaccattgaagcgaagggtttcaggggagaagcaagtgatgctgcagattaaaaaaaaaaaaagacattttacatctttctctctatgatctgtctctagaatgctacattctctgtgtaactgtccttgtgtgtatgcatgctcaccctgcccccaggcattttcctctgagtcccaccacagtctgactccgttttactgtccacatcaggaccagtcgtgcaaggcctgtttcaagcttctttgagatgaggctctatcttaactacatcagtggccttaatctctgacccggtgcttggtacttagcactcaaaataaagctgttgaattgaacttcaaaaagagattaatcccgatgcataaaaaagtataagggaattctgggcaaggttgaaatggatcctggtgggaaatctaaatatccctgcccatccagtctagatagaagctttgaaccctaaatattaattaaaaactttgatcgacagctgctggagacatgtctcttgaactctccttttagctagctacccaacgcattcaacaaacctatagctaattataatgattagaaacaaataacatacattaaggatgggggagggagtagttgagaggcgggaataaagctgtttctgggcgaggcaatttaacaggtgcatggcaacaagacgcagatgatctatggcagcaagtgaaatctcatctaataaaacaggtgggggttgaccaggaaatagatttgcatattagtcaaggtcttgtgctgcaccgagtggtatggccccaaacaactgagggaatgaagtgaccaagaccaacctggctctaagacaggggatctgaaacaccaccagtgtgcctgcagagaggccactccaaaaagtagcacccctcgggccactgcctgcaacgtcgggctgtcaggtggccagcctcaactaaacaaaggctgtgctcaagtccagctcctgcactgggatccagctgtgtctcttcagcttgagccatgagtcaagggcttcaaattctgggaacttacatcattcaccattcagcagtggagccagagtggtaggaatgggtagagagcaggagacactaaacacaagtgctaaaccaccaaaacacggccctgtctccctggcacttggcggagctgagcatgcagcagtagcaggagtccagtggtactgctccagtcaggaagcaaaactgaggtcacctcaggggagcctggagaggccctgtgaatttcctctggtagccatacagtctgggaaggagccagcgtgctaattaggcatctggtcagtttccccttgctttggattcctgatgtagccaaaaggaagtgactcattgggttcacttcccttcaccaagtacactactgagggcttagaagcattgcccctctactgatgactttcagagcccaaagctcatcctaagaaagggaggagagagaaactttggagggaagggcagtgtaatggtgcctatgaaagggaaaagagaaaggccaagatggagaagagagaactctgaaacaaaaatggggacatatattggttcttttctttcacaggtagaatttaggggtgtgtgtgtgtgtgtgtgtgtgtgtgtgtgtgtgtgtgtgtgtgtgatcacagaaatagagaactgtaagagggaggaagagatttaaataggagaagggaactatagatcatattggaatatatgtgtctatatgtgtcatgatcgcagacagggactgtttggaggaagaaggggaccatggagaaggggagagggaagacagggaaggcactggggaaaagacaaataagaacaaagtatatagatacaagaaaatgtcccaatgaaacccacttctgtgtgtattaaccagaaaagagtttttaaaaacaatctatacaggcaaacaaaacaaaaagacacaagaggaagagaagaggagaggggtgaacaggaaggcagctggaattgggctgcctcgatacacctgcccggtttccccatcgccctgtacaaaggcagtgctggctgagccaggaacccaggactgtgccgtggggactcacatgagttctcggaccatgtctcgggtgatgagctggattttctctggcttgtggtccaagcccagatcagtgagagttttccggacagcatgtttatctcggagaagcacgatagggctgtcactcctgccctggggcgtaggctatgagatcagataggaagactgagaagctggtcattccacttcccgctgacccattctaactgcaggggtagcgtccctggggctcgggcattgtagtgcctcttactcttgggcaggcattcctcctgaggatgccagagactgtgccaagggatggggaggagaggggggtgacaatgtatatctatccctatgttaaaaccattaggaatgaaattaaaatgttcgtgtgcaggttatctctctgtgaacatttctggtcttgtgaaattcttggaccacactgtgagtttgaaacaatacatgttacagattaatctatcccttagttttagtcatttgcaatcttttctaatgattaatagtccgagagagagagagagagagagagagagagagagagagagagagagagagagagagagagagcaagccatatggagggagttagacatagctaagtagcctttaaatcttaagtgtttgggccaagcattgtggcgcacacctttgatccgagcaactgggaggcagaggcaggaggaaaactagtttgaagccagcctaggttacacatcaagacactcagcaaaaacaaatgtggttaagaaggtcaccgaggattctgcaaaatgaacacagatcaggtgtgtgagctttttttttttttttttttttttttcctaacagtgaaaagggttatcaagaaaatgcaaccaaaaaaagagaaaattaagaaaaagaaaatgcacccacccattttgtaaacacggtaaaatataggtgctggaaatgcagtaactgacacctgcccggtatctgaggggcaggaggtgggcgagggggaggtggctttgactaattcactttgcactgtcccctgagcgagcgctgctgccacctgctgttcatctctgcttccggaagggcacgactcagtcgtgccacgggccacttctgccccctaccgccaacttcctggactctcatctacccataaggccacagaacttgggccgacgaattcttgtagcacttggccatttcccaccctcgttttgactagaaatttccatgaggacccttctcctcaaaaaagagactctaagtgtaattatgaaatcgcatccttttgatgcttgtctctaccggtggggaaaacactgcagatggggacatcttccgagggaccctctagaaagccatcatccacgcacatggagaccagtgaagagaaggaacagagacaccagctctctattccccagcccacctatgcttccaacgagccacttctttctcctctctgctcttcctctcaatcctttcttgctcggcaatccgagtctcactctttttttcccatttctcatctgccaccacagacacaaaaattgtcccaaacaactcctcttcttttcttcattccaggaattgtcattgtcctagtctgggtctgtcttgcttgtctccccaagctaagcaattgttttagttgagcacctgaagttgaaagggggtgactgtttgtgttgctttgtactctgacgctgtgaagcaatgggaattttcaggggtgaggaaccaggtacctctgtcttggaacacactggatgttcgggactgtacagctagggcccctcaacttccccatttcctttggtatgaaatctcagcaaggtggctagtacaagcttcatcctaagcaacgttggtctaggagtggggaagggggggaggggtctgctgatggttagttaccttgacacctccaaaaaggctctcatctacctcagagttcatggctttggtccgatagcgagtcctattccgtgacctattggaagcagtggaaacggagcttgaggcatcccctgtgctttgtggctgcaggaagagacggaaagtattggacatcagcatccagcgacattgagaccacaggcagcgaacatctctctggtttatgtggagaactagaaaggtggccgtgttgggcgtgcctcttgcagagagtgtctgcataggccctgaaatgtaggggcacaacatccccttggggtaggggggatctcttgataaggcccactagccctacaaaagagagtttctgtagtcttgcgagctgataaagccaagtcagtcccaaggtacaaatgaaaggttggagaaaaagatgacaagaggaaaggagtaacgctgcaccccgttgtctgccccggtgtgtttccccacaaggacggccttgaggaggcagctgagcctgtcctcttatggccggccttctcagctcacctctagggcccccttcgctaagggcgtaccacaaaaggaaataaaagatgtagagactcattcaggccacagctcagcatgcgatggctgacaaactttaggtagtggatgaacaataatcacccgctacaatcagacaagaaccaaagtgtaacacacactataccattcccaggtttggcaaattcctcctctaacaactgtgagagacaagactcattcccaacaacaaaagctgaaaacaacatgtatttgccttcctagtcaagcaggggatctaagctgagccaaccagacgcccccgacacgatggtgactaaagagccctagagagccggtgatgcaagacacagaacaaggaaagcctgtctgacgcgggcggcaagagcagtcacactcagcatctggggcaacactgataaggataccaccagcatgcaaagccagccatgctttggattttggccttggttacagctgaaaaggcaccctttgttcctattttccaaaccttgcttccctgctggtgcaaaatcagcgggctttcctaaaccctctcagggtgttccatcctatttaaataagagttctggttctgctgcttacagccgagaacccagctagtcacaacctccaatcccagcggtcagttctacttcagcttggccgggagagtagatgtctacatccaggaagccgtttctgctaggacttttggataacagtagccttaatctaaagctgattcatacattactttggaggagcccacacccgcctcgaccaagctcaataagcagagatatcttggggaaatggtctagacacactgggtctctccaagtctgggaaccagcagccacagcattggggtggggtgggggggatcgtaacaggcgtggaccttgcattccaggtcgctaaacattggccagtgttttacaagctctccatgatttgccattaccaacaagacctcctcccagaccccgtagcacctgtgccgggttttcacaccaaactgggcaataattcctctctaccaaacaatgagaactgttgggtgtgccttcccctcgctgcctggcacaggcagcagaggcttgcagagggagccagccccccttacgtcttcagccagccccaagacaaccgagcaaacaagcctgggcttataaaagagtaaatatggcagcaccgatgatgcctaatggcagtctctgatgggttgtcatatggcgggggtgagcaactgctcccctgtccgttgaaaatagcataagaggaaatgaacagaaacttcagtagataggatgggggggcttgaaggacaatgaagggcggagtttgagttctctgtgtattaagggagaaagtgcagggcctggcacatagtaggaacccaacttacatatgacacaaagcaaggaaagaaattaaacaaagtgacctcacaaggagtctagcccaaacggagatgcgtgtctctgggaaatgcatgtctgactccaagtcactccaccattccacgttttccagatcacgtatgcggtctgcactgtggataataacatatacgacagggctttggagtacagatggaaagtatcattattgttttcgcatctgttttcctgtttcttttcaagggttccttgtgtgtggcattgtgcaccagactataggtccctcaaggcagagactgtcttctctttcctttgtccttggaacccaggttggaggaagccactgcaggaaataatccactgcctgagcctagaagtcagaacagaggaaggaaagcaaatgaccacagaaaaatagccactgagcaggctggggggggggggaagctatgagctctcttgttgggtatctgagtaaacctcatttgagaaccgctgactttgaagccacaagccttaccccaaggctagaataaccaattttgccaagagtaacaagaagaactagggaggtcactgtgtaaacacgctagaaaaaagaaagaagaaccaagcaaaaatggaaagttggatccctctggatcagaggtagtagccaagtggtcttcttaggaggtaaagggctggcttcatttcttgcgttaccaaataaatatccccacaacgctgagcagtggctagccagaagctgcctgcccctgcttggaaggagacagtgttggaaggaaaagctgcttgctccagctaccaacagctgagaaggccaggggcaatggggaagatgaaggttgatcaaggaacagacaaaatgcaagccctgcattaatatgcttaccttggtgacccagctgcccccttctctttaaatcccatctcatcccatgggcatggcaatcccttctaaacaaggctgctctaacagagatgctgaggcagaaaggttaagtcaaatggacagagatgaaatagggagagctctataatatacagagtttttaaggaaactctttcaatagaagagggaggaggatgtgatgggaacaggaaaggatattgacaagaaacacattctaagaaatacacaagtactcctatagaaatgttggaaacgagggctggctttaattgcaaaatgcttgttgcacaaaagtgtgaggacctgagtttgaatctctggactcacataaaaaccaagcatagcagcacacatctgtggttctacccctggcatttcaggtgagtattaacatctgaagctgttcctcatattgagtaactttctgcagtgaattgataactattttatggcccagaaacataataatagtataataataataaactctttcttgttgaaaacaaagtgtaactgtatggggctggtacatgtctctgaaggcaagacagtgcagcccctaaaaacaaacttaattttatttatacagatggcaggatctaggatacttggtttaaattcaacaagacaatactagcaggggctggaataggtcggtgtggagtttccctgatgtaagtccaacacctgtcaattgaacaaagacaaaggcatgttcgttcttagatgcccttcctactctgaggtctagttcctcttacacacagagtcaacacaagctgacacagtcagacttcagtttcttggcctagtgtacttcctttccatagacttggctattaagaaaggagggatccccacatcgggcccctggctttttactctgagcgatccagctggttggcctctgtctttaagtggaccagattgctcatctgtggcagatcacctaacatcacagcagagttggtactgaggcacccacccctccctctggagaatgctattaatcattttcttttgaagcgattaatagcctatgatttccctctcttctcattcctccatgctctcaaaaaagcttgtgagtagcactatagacacgcacacacacatatgcacaccatacacacacacacacacacacacacacacacacacacacacacgcgcgcgcacacacacctggcctgctagggattactcaaacccactatcttcccaacatgactatatacccattcctatccaaagggttttatatgggttgagtcacttagccagatccttgtcctgagtggtcttcggatgacaatctctgagcttgggggctatgcagtccacaagtctagctagtccactgcaacttactgattcatgaatgcttgggaaatggatacttttaaaacagaagagatgagctgacatctgctgcctgtccttagatactaggcgtgatgccaggtcaacacacacccccacacccccacacacacactgctgtgctgaggggagacaatcaaataacatgtacaaccaaaggagatcccccatcactacattccagagggtcccctaaagttgggaacttgaagacttattttataattagcttcttttgaaatccactaaaccccacaaaaagcaaggcagcctctgagcctaaagtgtgtccacaaatacaacccaattaccctctttagccacccaggttgccagacattctaagaaagtcccagtgactgtatgctccaacatctgtccgaagcctcccttaacccatcagaaccaacacgctcaggcccaggctttcagggctcctaccaggtcttgctgatccctcaatctatgaccatggcagtccaccccagctcaaggaatctcgggactgtccgacttatcccagtcattccctagaactttgtaaacctgggatcctcctcatccatccatccatccatccatccatccatccactcatccattcacaaattttatggcgtgcccaccgagtgatcctaaatcattcccacacaagtgagaaccgaggctcttctggaacattaggtgccttttccatgatcaccctactggttagccgcatagcagtgtcgtcgagcccatcatctggccttcttaccggagcttttctccacatcacatcccaccacccaagagggccagggcaatgggatggcgaaaggtgcagcacatcccccaatcagccctacccgaggttgccaatcactactaagtcttttgaatctgcctctggacttcatttgctccgttttcaggatggtcccgtccacactcctagaacttcctatcctccccagcctctccgagacaaccccagctttccccctcaaagcccatttcacctcaggactcaggaactatagctacccagagcctcaccatctctgccaccgcttcagctgatggcgctgccaccggctccgcgggagctgacgcgttaccgtagcaaccgagaacccacagtcagcgtcttagccccgccccctacactgcccctcccaattcctggggcagccacaaggtagtttagaagcaggaactcttctctcaagcttttcccgtcctacagtggagtgggaacaaggcttttgaaggttgagccccttggatacgcccctgacgtccatttctgctttgactcagtttaagtcagcctgaaactttaaaggacctactttccatgagctcccgagggctcaactatcaggagcccaagagccaggcccaggatcgtggttttccctcacagacccttccacccaccctaggttaccatggttactgctacgggtttccaggaggatccaaaccaaacctgatgagagttcaggctgcagagaagcagcagcattaaaacaaacaaatttcacagtaggagggagtctgacgaggccaaagatgggtatatagtctcacaagctctgagatctgggggagtttattgaaaatacagggagtctgggacagttcaaaaccagcctaggcaacagagtaagcttcatctcaataaataagtaaaaactaaaaatgtaagtcctacctaaacgacgtcaaaaatccatagctccagcttagggggcctgcctttcacctactgtgaatgttttcaggagctctaagcttcacccgtttggctttggtcccccgtgcctccccatctgcaggacagaaccgaacagacctgggatcctgcatgccccacaactcacgaaacctcccacaaaccaggtgaggtgctttgttgttgttgttgttgttgttgttgttgttgttgttgttgttgtttttctttctcagaggtttattttctgagttcttggtctctccaaaaccccaaatctccctccaaactctgacccttattcaaacctaagcatcaaaagcagttggcaagctctggggaagtagagggagggagacggggttacctgcccaccacctccaccactgcctctgctgctgcttaatccaaaaagctacggtgttcattccctggattcctccactcttatctcccttggaatccaattattaaccacatctctctgaggtagatattagccccataaccaaagagaaagaccaggagaggcaactgcaaaactaagcatgtgttcaactcagactgccacgctgaaggaagggtgtaaaaggctggggggagggggcgttttgggtgacagtgattgcgcaccgtaaagaaatcacccccagcagtctgtctgaaagtagctcacagtgaacagtgccttgctccaggcctgcggctggcatgaggcacttaaggctcatagcaaagccctgagccatatgtctgcttagtcatgtatttgtgcaacgtcagttgatttaaagaagcatttattctggatttagcggcacatgctgttgtggcttccatcacttgcgtgtacagttaagactctcccagaataggaaagcttcctggaatgctcctcccaccagactactaagtcaactccctggacatccaggcagccactaatcaaccatattctccatatatctgtgttgtgatgcctgatgcctacaggatccgaaaatggaggggaaacaaggctgggaatgaacaaagccagaagccagtctgtgggaaaatattcctctaaccatcagtgctgtagagctgtaggtgggcatggaagatggatctctggataaaatgtgtgacacataagcctgaagaccagagttcagctccccaaaacccacataaacgcctgatgagactagtaggcatgacagtccctaatctcaagaggcagagatgggggtcccaaagcaattcagcctcctagcttaacagaatcagaaagctctggatttaagtgggagacctaacttcaatatataaggtggggaggacacccaataccaacctcccgtctccacagccatgcacactcatgcaatgtatctgagcacacatgcaagcacatgcatgcacaccgtgtgtgtgtacacatacaagtaagactaggacaaaatgctaaatggggattccatttatattagtgcttagcaaactttgtaaattaaatgcttagtaaactttgggtccagaaagagacacaacaatgcaactcacaaagttacatgtacatcagatgtttcctcagggaaaagctgcccccggggcccccagactggctggcctcttgcatttctccttcactgatgttttctctttgcatttctttatttcagcacctgaaatacacaagtcacccgagttttcctaagcataatgaggcagtcttctcatttgaaaactgtccaagttgtgtgttagtttcccactgctgctgtaacaagtcaccatgagcttagtagcctaaataaacacaaatttattaccgttttaaagtttgaagtgggcttcagtaggctaaaatctaagtaccagtggggatttgatggggaacatccttctgtgtatgtttgtcttattggttgatacataaagcactgttggccaataggaaagcaagataggtatgactaggagagaaggaggattctgggaaatgtagtaaggagaggagtcatcgtgtaatccctgcaagagaggacgcatgccaccagcatccttggtaagataagtctttataaaatatatagatttatggttatggttgatacttaggacagagctagcaaatgagaaatcctactcattggccagctgcatttaactaacataagactctgtgtgttgtttaggggccccagagtggtggtagaactcaggcagctggcagaaagagttatccttacagggatacattcttcctagggattctggtgttcctcaggttgcccctttcccttggctcatgacctcttccactatccacaaaggcaacattgtggactgtctctgcagtagtcacacttcctctgctgggaaaggctctctgacttttcaggactctgtccacccagaacattgaagaccacccccaccccatctcaggctccttaacttaatcatttccaaaaagctgctttttccatataaggtgaatattcacaagttctggggataaagaggtggacctctgggcactgtggttggaagggtgtgcttcattctgcctaccgaacagtgaagcataacaagggtattttaagggctctgtgacatatttgctccttaaatttttgaacacttttcttatctatcatttttatgtacatgagtataatgattaaattgtttgcgtagcacatgcctgcagtacccctgggggccagaagatggcattggatcccctggaactgaagttacagagcgttaggatctgccctgtgggtgctgggaatcaaaactgggtcctcaagaagagcacagatccatctctccatgccctgcaatatgtttccaaagatttgaaaaataaaatgaaatttattgagcatgctgctttaaactccattttatttatgtttttatttgaagcttcttttatactgaaaatattttttcatacaatgtgttctgaccacagttacccctctcatcttctctcagatcctccccacccacccttccaacttcataccttcgtcctctctctttagaaaacaaataaaattagtacataaggaaaagaaaaaaggaagaaaggaaaaacatgagaaacacatacacatacagacacacacaaacccacacaataaataaataaataacaaaaaatagctgggtgatagtgagtttgaggtcatcctggtctacaaagagagttccagaacagtcaggaactctgttttaaagcaacaacaacaaacccacaaaaatcagaaaccatagcatataagcaaaagaccagtcaggaggtaaaatgtccagacaaagcaatatgagaccaaaaagaaaaaaaatgccactgagtccattctgtgttggccatctactgctggacgtggggcctggcctttcgagtggtctgtatacccaatgagactccactggagaaactaactgttcctttaccagtgcttgtcaactacagacagcttcttcgctagggatgggagctcatgtccatttcccccacttggcttggacctgtgcaagccctgtgtttactgccacagccttctgggttcatatgtgcatcagtcttgttgtgtctggaagacagtttccttggtgtcatccatcccctccagctcttacagtctttcagcctcctcttctgtatagttccctgtgccctaaggggaaggggttaatgaggacatcccattttggactgatatttttgttgggggggtgctggcgtgattcccctgtctctgccttccatctccatgtaagagcaccatgaataccaacatggactatgatatccagagatcgagtttaggtaggtcaagcttttgcagctagtacttttatccactgagaaatctccttaaactgagaatccaactcagggcctcaggcatcccaggaaagtgctctaccactgacctaaatccccagctgcaagtcaaatttcaaagatttctgatttggatacatatggacactgtattttcttcttacatctttaagtgtgtctattaaaaggcatcaaattaacttaaaatggacatctcatgaagcagaaatagaaagaaaaaaaaaaaaagccctgaaatcggtaggaattactttaaaattgagaagcaaattaaaacaatttttaaattatactgcaaaaagagtaattccaaaagaggaacggatgaaatttgaaggaataagaagactaaatttaggttgtgtagtaatccacttaccaagaagagggaaatgctacaaacattgggagaatgttaaattttttgttgacttaatataaagcactgacattgacagagaatgcatgaaacccatattagcacggcaagaggagaccagcgacaatctgattaatgagtatcatcaattcaaaggacacttaagattaattactgaacaatgctctgaaaccctacaactcctataagaaagaaatttagtacaaattttcccaaatttgacaacaacaaaaactgacgtgattttgcctacaacaaactgtgaagtgagacattccaatctaccaataattacaaaaatactgatcagtccacatcccagggaagactgggttgtcttgctcaggctagaaaatcatgatcaggtgagaggctaagagagggggcgaaaggccatgcgcaaaacatattactcctggggtggagattgttttgtgacattttccagaatgcttagagcttataattattccagcttcgtttattattccaagggtttggttctgtgttcaattttggattaataatttcaatatacagagaaaccctgtctcgaaaaaacaaaataataataataataaaataataataataataataataataataataataatataatttcagattgctccattggggcttccaaaaagcttcaggcctcacaacactctttttatttttcttcttctctttcccagcagagcttggctccaaagcacagcagtatcctatccttgtctagtaagggttcagaccattacctccctccaccagcccctcccattcactcatccctctacagccttctcttcttccagctgtggccacctgctcatctttggagtcctttcccttccaccttcccccataagcattcttttgtttgtttgtttgttgctctcctctgctctctctgtcccattttcatcatgtcctcactgtccagcaagtccccagatgagagctatgagaaggggggggtactgttccactcaacctgaccccacctcaggctgcctgaccctcccaaccatgacatctctcacagggaagccccacactaaggcccaggttgctagccagcggtcaggatccaggagactggtggaggcaagagcctggagcacagcctgtcagttctggtttggacttggccctggaacagccttctgaccccttggagccttgaagggtgactggccaggcaccttgggatgctccccacactggctgaggcgggagatctaggaagtttgactctgatgaataagcacgtttagctggagcctgggaaacatggtccagcagtactattaaagtctggcttctcactggagcgtgtctcctgtctaagcagtgagaagggagactgatgctctgctactttttgtcctccccttcctctggcctctctgaaatgcacggaggaacctggcctcccagcactagggtgacacactctgaagctaggcgaggaaggaaactggatggggcagctgggcatggaactccacgttcctgtagagggtttgtgtaccttgcttacggctctcctgcacggagtctttctggactcctatactcggactcgggagttgttgtggccaagagtcacctccatcctctggacctgtcctgtcaccttcgctagcctttgtttccattttagaggtatccagttgttcctcagtagagaagctgtttcttctgagtctggtttccagccaaaatcccatcttggagggcctggaggaagctctcccatgctgtgttccctgggggaacagaatggaaaaggacaactatgattttagagtctcccaaggcttgaccctggcctgggcctggtttcctcttgggaaaggataatagcccccaccctgggggatcggggaggagtaagaagataagaccaagctcaaaaatcagtgtgcagtattttcttacccccagccacgcattgcggggggggggggaggttgtccttggtatagcacaaacatcaggactcaggaatggatcttaccctctctactaagcttggtgaggctagagagctgcgtcaccatcccctttcctggaacacttaaattcttcaaaccaccctaaattcttttgaaatcaaaggaaggctcaaaacataaataaatgcttaaacgcacgaattactttacttaaattgctaactgctttccatctgtcttcaaaactccctttctctttcctgttcttaacgactgcccaagagacccagctgaggcagggagagaagagagcctaaaacactaaaacacaaacacgggggacacaatctgaaaccaaacagaaagaataacagtgcacagaactgtgggggcagggatgtcagtgtggggtggaagtagggaccactgggagtccttggggctggagactttgagtctacagaggagagagaggggcatacagcagaggggatggtgaaagaagagttgagacatcagagttaggacacagagagaccctggttagtcaggtacctcccagagaaagacattaatgaaactgtgcccctaaccaccctcccagacttcttgaactccacagcacctccctcctacccacccagtacttgggccaatgttcccttggtgtcctggacatgcctggcaccagcgtcccctcctacgtgaccagcacacagccctggactgggtggcggatgctgagataaggccaaggaggggaaaaaaaaactccaaagtcaggaagttgctcaggctggttcccctggcaaccccaccacagtcaccaaacagagctggggttgagggggtagggacaagaactgttcccggctcaggccagaactcttccaagacctcggttttcttgttagagaaattttttccagtcttctaggatatactgcatttgagatgcaatttaatctccacccaggttctgtgtcgatagctctaataagtctgctggaatctgcatttctcactagcgtcccattgagttccatgctggagtgtgaggatgtctcttagagaatgggatgtgtttaacaggttggagctcatgatggccaggttaagagaatcctgtgttccctgaagtctatagccagcaccagctccatgggtgtctgactatgaatatcaactgactgacaggagtctaaaaacctgggattctagttcatgcagaaccagttcaaactcctgaactctgagctccttctggctgcaacactttctggttctgagaaccaggagccaagggaagataagtaatgtatgcttataagtaatgggctagttactctttctgctctcaggaaccctaggactccaggcaaatcactcacactccctaagctttggcttttctattctctcaaaggatatgaaaatattaaagccttaccaggaggtgacaaacctctctgggaccaataaatatccaaaaatgtcttgaaagcacaccccttgggtattgtctcggtggtcgcagtagtttctgtcactggaggtaaaaatggggctatctgagggaggtcgacgaaggtcaggctgccttgagcaggaaacctgcagaagcagaatccaggggctgcgcctcaggcgctcttgtcggttcctctccaaagcagccagatctccatttaactagagaggtggctgccgcagagctgaacttcctgtacctcttgccaagcctgacctctcccttcctccactgtggccctgaactccactcacaggaaaaccacagctcgagccagctgtaggctgaacccttcttcagggtcagtcatttcacaggggaaccccacaaaaccccacaacagggtgagcagtagcttggacttctgctatctagagtttaggtttcagttgatccattagtttggctgggctagttactcttagagcttaagtgttctcctctgtaaaatgggaaggattcgtattctatgttagtgtcctctcttcgtggatttctcagctggcacatgaattactccatctaaacaatgtctttcctaaccccttcctctctcctccatgttacactgtcaataagagtcacaaacagcttcattatcttcttccagtcctcattgccctacccttaacccaggccactgtcacttcagcctgagccactgcagtggtccttttcctattttaggccattctttgccttgcagcctcatagaactttctgaacaagacacagtttacaactctggctcggcatcactcagtcatgaggtatggtggcaaacacctgaaccccagcatgccataggcagaggcaggaagactgccacaagttcaaagccaaccacagaagaccctgtctccagggaaagaatccagtggcttctttgaagctcctctgatgacctgatcctcacttcccttctcaatcacatttcttagcatcgtctctaaattcaaagatttatagtccagttcagcatagcttcacctctgccagggcgcttatcacatcgtgcctaggaagcctcaccatccctggccaccccatatggttccaaccatccttgcatcttcatgtgtcaccgtcttcccagcctcatggaaggtgtatggtaggatccaattttttaactggttttctggtagggaaatgtggctcagtgtgtggtaaaagcatgataatgacggtgatggtgatgataggccatggcccccatcctggagatccctctaagacctaggccctcttataatgtcacaagacatgctttataactgtctccttgcttttcttcccctttctggagagcagaaattacttgtcttgttagtttcagagcccccaccccagaaggcagcaggtaccacaaccttgaaaagatgttcaaggattgctttttgaaataatgaaagaataaatccacggacagcggtggcgcacgccttcaatcccagcacttgggaggcagaggcaggcagatctctatgagttccaggccagcctggtctacagagtgagttccaggacaaccttcaaaacaatacagagaaaccctgtctcgaagaacaaacaaacaaaaaagaataaatctaaaacatagagctcctagcatagtgtgtagcaaagaggataagtggatgtcaccaccatcgtcatgctcctgtcactagaaaaccagcttccctactggaaaaccaactaaaaagtcaacttcgaggcgcacacctttaatcccagcactggagaggcagaggcaggaggatctctgtgagttcgaggccagcctggtctccagagcgagtgccaggataggctccaaagctacacagagaaaccgtgtctcgaaaaacaaaaaaacaaaacaaaacaaaaaaagtcgacttctaccaaaaatggagtagaatgacagcccggtgtcggatgagatgtctctgtcacctctccacacccacttcaggtgatattgacctgggtgctcctgccaaccctggttctcacccgtatgcctctttgactgtatccatcccaaagaaggaaagacactccatgaacagacacttgacccctgatcacaaaaccagtgactcctcattattccaagtcttcccgataggctcctgtattcccttgggcagatgggagggggcagaaaattcctggtataggtgacctctgatcctcatggcattcagggattcaccagggtattgaggagttgacaagacagccctcccatagagtcccatgcattcctcacaggcatgtgtcactggcttcgagaatcaccacagctcacatccatatattatttcccttcaggaccacatagtctttgagcaaagaggtcatgtatcaataatttaccctgcgaggtctgaaacagaacctcagtaagtgcagtaagtgttgaaacacacacacatgaaagaaagggagtgtatctgagctttccaggcagaactgcccattttcctccattaagaagtgagatttgtcctatttattgaagacattccttctgacccttgagagattccagaggctaataacctttagaagcaagagtatcatttttctttgtctaacctaaatttctgtagatgcaactttagggcatttttctgtaaccctcctccccagccactgggactaaaccctgcttctttgcaaagtgacagttgctaattcattcttttagccctttcttcaacaaatttaatccaggctctttattgtttccttccctagggtcctattacccagccttctccctgttccactgttccttgggccccttgccaagttctcaaacagcaataggggcaggaatgacgcctattgttctccaaggtggacaaacacacagatgcctacgcacacaggaccaacagctctacccaccctttatcctccacccggggcagacagacacgcaaagtcagtctcttcacgcagattcatctctcccacctggggcccctgagtctcggtctagtcagtcctcacacacctgggtacacactcactcagggacagctcagacctttagttttcctcacaggcaagccaaactgggcggagcttctgaaaccctccttcccgcccatccaccccgcccttctctaattctattggctaccaagggccacgcccacttttctacacttccagtgattttccacttcatggatgaaggcgaaggaaggaaggaaagttgactctgccaccttcttcccgtgctcctcccactccccacccccccacccccatcccaaaccctcagtcctccttccatttgctcacatacactaccctccatccacttggcggcttctctggctgtagggagtgaagctgcttggggttcgctttgtgaaaattagcacaagggaagcgcgggagctgataaaatgagcttggttccatctcagatctgatgagaggctgagtcgcttgctgtggccctgggctggctgggcactatctcactaggcaaggggatttgagagcaagcaggtgatatgacagtcgttcgtttattcatctaacaaatatttatccagcacctgtagcaccactctacatgaacaaaaccaataaaaccctgcccccgtgccgtgtagactccatgggcggaggctgagaatgagtaagtaaaacatattggctctccagcagtcataaatggcagtacaaaaggcgaggggggggatatgcgggctgaggtggtgtgcaattttaagtagggtggtcaggaatggtgctatttgaacaaagctttgaggagataaaaagagcaaaccatggaaagacctccaaggagattgttttaggtagctgaaccctccaggagaaacagctcctttgtacaatgtcccctttgcttgtcatctcctggtccccattctttgtggctttctgtatgtgttttgtaactgatactgcaaggagggtccagggttgggacccattctggactccaggacttgaaagggtgccaggaaaaattagaagagccaaatctggagtgaaactgacccagcttggaccaaaagccaaaaagcaaacaaacagaaaatgatacaagatcttaagatgttagtccccaaagggttttgtcttagttgttctctgttgctgtaataaagataccaggaccaaaagcaacttggcaagaaaaagatttatttgttttacacgtcctaagtcacagtccactgtggggagtcaggacaggaactcaaggcaggaatctgtaggcaggagctgaagcagaagccatagaggagcactgcttactgactcattcttcatgccttgtttaagctgttttctattatcacccaggaccacctgcccattgtgggctgggccctcccacactggccctcctgtaggccaatctaatggatgcattttctcaatgacattcctcttcccaaataactcatttgtgtttagttcacacacacacacacacacacacacacacacacacacacacacacactaactaggacagatttgaatgtctactgagatggattaagagatattgagattcctttccaagcttggcagttggagatcacagccagaaggaaagaaggaaaaatggtcatgccttggaccccactggtgtctgccttggaaatgtcactctagagagtgagatagggccaggcgaggcttctttgatcacattcatcagtacagtggtgatggtctgaagaaccaaagggcatcagcaatctcccagttcactgtgcacacacagcctaccttttatcccctcccatccatttcttgggcctttacaagcatttaccattcaagtcctttccgttctgggcttacacaaccttcacaggagccttgggagaagtcatcctctctagtttacaggatgagaaacagcatcccatgatcccaccttcattcactccccagtccctccacatctccacttgtggctgagcccgtaacagcacaggctgaatgaaccacaccatcagctaggttgacttagggctcaaatacctgctccttcttgtgacagctaggtggccttagctaagtctcttgccctttgtgagacctagagaatggacttctataagagtcttctgggaccaggcagcgtaatgctgagccggatcacatcccagaaaattgcagtgttgacgatttgtagttctaaatagttaaatcagggaaggatgtttaaaaaaaaaaaaaatcagtgaattcagtgttttctctgcaatgacatcactctctcacactggcagtccacaaagccttcctgaaaaagagataaaggagtgacagctaacccccaggagatttatacagaggcttcagcctatcttatctgtaccacagtccctgagagtgcagcaagcaagaaaatgctatctcttccatagtgaggtgtcgggataaggttgaaagccgtgaggctgatagctatggcatggtgtctggcacacagtaggtgtttctaggaagagactgccacagtgaggcggggaaggagtgcgagacaaaagctctttggttccaaactgctgtattatctgggtctcaggcacagtgttgtggctttctgcactgaaacagataggtagtaccaaaacagaaagagggagagggacatcggagactatggccctgagactggctagtgagggtagacagggctcaagcattagctgccctagagtccctcgggttctctgtgggaaagcacacagccagcataggaagccttgagataatgggaggtcttcaggctgcaagcattcattcctgggttgtgctgaggacagagtgaccccaagttgattatctcatacaaggccaaagtctagaggcctcaaggtgctcgctccctggaatgcagctcacaggtgcttggcgtcaaaggactaggcatctccacaggcaactaactcattttgctaatttcccagcctttggttctatccagtcactgtgacctcatcttcagcccccacgctggaaaagcctactccaacatgggccatcttgccccttgtctgccttaagggcctcctgtttggttaagtctgtccttgtcaagactcagccagaggtagcagaccatttgcccaattcactgagaaatagagttctcccgtcctgcaaacgcagcctacataagctgcattaaggctcctaccccaagtgaggtcctgtctcttcttaatcccaacctgtgctcccctgaacagaatgacagggctcagccctgcaacctttcatctctgccctcactcttggtctggtatgactccctccccggagtgggcacagtggccctagacacagcctgactccatccaaaaaagaatgagattctttattgaaaatcagcaaactcatgttcctcaagccccagaccatggtgggcagctctcccacctctgtctccgaggccccaccccttagccacagtgagaggaatggaaaataagaagccaaaagggcctctgctggggaaagctgcccagatgtgtgctaagtacagcccagctgtggctggagcgacagccacaggtcccgccctataaattaagtccctacagccacagctgtaagagaggcatacttgtaggagggtcagtgcggcacggggccacagggcagcatctctgacttctagccaaggaatggactgaaaagcacagagcttaggaaaagagaagcatgctgggggaagaaggctttggtcccaggggaaagttggtccagttttgatggctgtgttgaaggaatgtattagtaagcccagagagagagagagaatcatcgggcactgccagaggtgacaagatagcttggaccccaccctggcagaggggagcttagagatccaggggctctcagggaatgtcactgctaaaacatatatatacatatatattaaccattcatggagggcaggggcaggatgggggggatgtctgatcagaggatctggcgtggcatcccatagccagtcatgcctgcctgagatgctccacggttggtgcccatctgtagcccaatcacattcttgccttcttgcaactggttgtctgagaagttccgggggttctccttggacttcctggggtggcaagggagtactgattaggagacggtcagaggccagtaaattcttccctgaacatgtaagctgatacccactctgcctttgagacctctgagctgcctagaagcacctctttgtctctccaaaaggacagtcatcgccactgcccccacctcccaccttccggagttctaaagatgctgtgtaatagctggttctatggcgacatcatttattttctacagacaggaatgggcaagaatactgaaccagcagatacttacttaggaaaccagttgggatccccagagaagagcccatcattcctggctactgccagcccacccaggttcattagtgtccgctgcacacaagccatgttctttgctggaagaaaaacaattatgttgtctgagtggaaggaagggtactggattccaggattctacctgtcactaagtctacagacttagcatcccaaagtcttcatttgttgttctcatctaacctgaagtatggcccatcctccatcgaacatataaatgcatacacacacacacacacacacacacacacacacacacacacacacaccacttatcggttttctttggtaaagatgcccagccaacacccccccccatctcctaggtaacagtcctgggccctggcccaccttcccagagatccacagtttggaagatgtcagtggtgttaatgccatagcgctcagcagcctgcaggaactgagagatctgctccatctgcttgaaggccattgtggaggcctggatcttcttaactggggcctgcccctcagggtatagtgaattgatgagctcacacagcacctggaggaggtgaggccatgcttggtaaagatcagagcaccaaagacagtgaacaccaaagacagtgaactagagagatgccttcctgccgtgagcctcaaggtcccttctgcctctgaacccagatgaagacccagtgtttagtctttccttgctactccagaatcactggccagctgttctaccagcacctatgagcttctgttgcaagaggcatatccaccctgacctttactccttgggtaggtaggaaagcatgggggctctaacagcctccaggaagatactcaggttgaagacaaactcgggtctgcgtgctctttcttctcttccgtgggttacacagtctctgatctctcctagcatcagccctgccctccctgcacctcccacctagctctcaccgtgccatctttgagccagttatggaagttctcacgcccaggctggggccggtccacaggcttgcggcactgcgtggtaatccattggatcaggatctgctccaggtccccatcgtattgcttctcaatcttctgttgcacctctcggctcaggccgtatgcaggtccccggttggccattctgacagctgtggtgacggtgaagagctatggagaggatataaccaggcccacggtcaacattctacaatacaaagggtgcccttgagggccagagaatgaatccctgcccaggacctagcacagcagggctctgaactctggccgggatgaggctacagatactaaacatcacttaaatgaatggtttacatctagaatgaagcctaggatccactggaatagaggacaggggaaatgctttgggttcagctcttggttgggaggaatgaagcctgacaaaggcaagttggtcagtctagcctgcaaccctgtcctttagagcctttgaaaaatgattcaggaaatgagaatacagagcatatgggaaacctgtgccaagaaagggagtgagtggaacaagcctctagaaaccaataagtttttttttatataaaatcaatcaaatcaatctttttagatttatttatttattatgcatacagtgttctgtctgcatgtatgcttgcatgccagaagaggacaccagatttcattacagatggttgtgagccaccatgtggttgctgggaattgaactcaggacctctggaagagcagccggcgctctcaacctctgagccatctctccagccccaaccgctaggtttttaagtgagcatctactgtttgtagtaggaattgtagaagagaatgaagtccggccctatgctatccccagtgccatcaaggggacacagggtgtgaaggagacagtgtaaacagtgtacactctgaccactaagctgcacagttccaatcatgttacaggaattaacagagcagagggacagaagcagtctgggtgggctggctggaaaaggtaagaccacattttagcaggcaaagggaacttcctgtgagaaagctagcaatcaaaacacattcttttccctcccttctaggcatcgtggtgacagacagaccaaagcccccccccccccccgcctccttctttactcttactctcaccaccaaaggcgtccgtgtactaattcccagaactgggagacatatcaccttacttagttgttttttttgttttttttttttaagtatggaaggagtgattgccaagcatcagccaggtgggcccagtagcatcacaagtgttctcattttcactgaatgaaagaggaaggcagaatgggaggggggaaggaagagtgtgtatcgcgcagagtcatgaaccaagcaatgaccccagacgccagaaaagaaaagaaaatggattctccgctagctccccagcccccgtgaatgcagtcccgccagcaactggacctcctccagtgacaaccccccccccaccgccaaccatcagagcagcctgtgtgtccctaagttcatagtttgttacagcagaaatgggaaattaatctagagccttggaccttattttcagggacacctggagagagaaaggacggtggcagcgggcacagctgggtttaactttccttgaggaccttggttagggaggactgggagcttctgaccacaggcctgaggtggcggcatttcactgtgggcagcctgccccacccaccactttagtgacaggtcccacacccaggaacctagagagcaagtactggacctgctgctgattcgcaagggagccaggaacagagcgggggcactgtccttcacttggtgctcccagcccctgcttccgggtccttctctctggtcagaaatagagccggccatctctaacagccaaaaagctggtgtccccaggacaagagcctccattcaaagagaggcagggagcccacatctggctgtaggccaggtcagacttaagggatgaagtcattctggctccctctctcatgcaccccaggttaaacactcccaccacccccacaatgggctctggggctctgccaaaatgcaagaagccaggctgtctccaataatgtctgggcagaggttgtgtgctgggtcagccccctcccccacccttcaacatggctgcccctttctgccctgggttatccagctacacatttccggcaggaccttccccataaatcagctatttttaaactccattaggagacttcccccagccagaccagataaatgtcaggctgggtcccgacctacatcacaccacaggccacacacacacaaccagcttgatgaaggcaggtaggagtgcagaggctgcagcctaggcagaaaagggcggggggggggggggggggggcagggagggcagcatccttgccctcacaagttcagctgcagctactcagctcccagtctatccaagcttcgtgttgtaactagaagacagggtaggagaaggagggggctaaaggctcctatcacaagcaatcctctttcccaacccaatttctagacctctcttctggaacagtttctcttggggctgtttccaaggagccaatgagtctaaagcctgggcacaagtaaaaaaagggcaagagaatgattaatccagataccagggttaagaagggagtccaaagacagaccctgccagtgtcccctgccccagatctacctctggataggtgactactgaggggccctcccctggctctggagcctggacacagctgtcgaggaggttggcctccagcagtgtctctctgttccactctgaggccacgaccccagaaccccaaagtggcagagccacggggtggagttctcagaagaggttatcccagccaggccagcagctgtgtctctccctaccccctcaggcaggcagacagctgatgggttgtggctgctgcagctggagagacccgccctagttacacccaggagacagaccccagccctccctcagaaagagaaaatagcaagtctccttctggtgtgggctaaagacatctgcccagctgtaacacaggtgtggaacatgcccaaaactgggtatcccacgtgaagacaacagctggacagcctacatggtgggctggcagtggagaactccagagctgactgtagtcctgggaacaatcctcactcaggcctacaaggttccatacaataactgggaaagaaggaggggccacaaaaggccttccaaccctgagctccacccaaaccacggctggcagcttacctcaccccatttgtcgtcaatgctgaaggcaaggggaacaccaagttgggaagggtcggactttgggactcctgactgtgactgagtatttactgggaagacaaggggactctcctctcattgtgcagatggaacactgggaacttcccaactcacttgtgagtcgggactgttctgaagcagaaatgccacatgggtaggcagaaggccagtggcagcactgtggttaaggggataccttggggaagaccctccccccaccagggggcagcccccttaccacctagagtcctgagcagaagagaaagctaagctccacaaacaggaagccgcaaggcctactcaggagcagaggagggggggtggaggccgttgccatgacttctgtgtaccaaacataagaatggaggcagggtgggggccccccaggcaggaacacccactccacacaggcttgggtggggaggccctgggcaaaggcgcatgagggatcctatcagttctcaggggatagccggaggcagctttggaggtcctggaaggcacatgcagtttgtgggtggagaagtctagaagacacttcccagataggaaagacgcttctgagctagaaagcccacccctggcaaatctcgacgagcaaggtgatggagtgaagacagactaggggccaatcccctggggatagacagtaaagtcatgggcgcgcaaagggattgcaaggtcaaagattatttgctggctctgggacggcagcaccctgctcacccctctcaaccttgccctgccgtcagaggtgtaccctgaacggctggaaggagaaactgggaggagcttggagatgaggagctgtccctgactactgccctgagagaacaaggggaggccgtcgagccacaggcctcctacatggcacctccgcttttcatcaccgctgcttttgctccacgacacctagagttccagaacctctcccataggaacacggggaggcctgcagagcccagcaaggaggcaatctacttccggtctgcaggttcagcccctccagccgccgcccccacccccacggccacaccctgggccgttactgcggatgagtcacccaccgccctcccgccactggggtgacgcaggtctgggcagcccgcccgcccgcccgcggccaccaccagctttcccagcagcagggggcacgggaggaggcagcggggctcaagctagggtaggagagcttggacagcggccaacccctccagacaggacacatccgagtgcagtcagggctgcagcctggagatgtccgaggtcaaaggcactccaagagagggataggggttcacagacgaccaggccactgtgcaagcaacgcacggagacccgtgaccccaggtggtgaacccaagtacccagaaaagcaaactagcggggcggagggggcgcaaaagggcggtctcgaggacacagaaggcaggcagcgctcacacgtgctcccggaccaggaagtaaaagggtcgcacggtaaattcagggactgtgcagacgcaccggggcgcgcgccaggaccctgtccccgccgccactcaacgccagcctgcgaacgtcggactccctccttccttcttccccaacaactcgacgctggagcggtctgctggggcttgggacccgaccccttgggtcgggaaggacgccccgtctatgcacccgcaaggctcgccttactcaattgccccacaatgcagagtccaggcttgggaaccggacctgacagcacggggcggggcacccagttcggacccttgcggctggctgccagtctacaacccctacgctccctggagcaataatcaagtgttggcttttgctttctacaggccccacacatacccccacccgactcccaccccgcttccttggtccctcagtcctgctcaccgtccaagctggatgggcaagtgctcacgcacgtcaggggctgcagtgcagagtggagctcaagacccgaccaggcttggagttttctggagggtcccgcctcagacggggcggaccaggggcggggcaagggccgagatggtttaaaggcgcagcctcccagcctcgtggaatgcgggtaagcttaagataaggtggtcagcaggcaggaaggagggctaaaggacctgctgagtccttggagccgctgcacaggtctccacccatgagagctcaacctccactcaacagccatagacttgtaatccagtaggaaactttctgcctaggttagttagtttaaaaactgggaaggtaaatggaggtacaggaagagccttaccccaggattgagtagggtgtgacaggactggggcttgcaggctgggacagcacccccacgtggttctgcttgccatttaacttcaagcccgggcaaaaactaatagtgaggtcactccttgcccagggcccaaggggtgtggtagggcttagaacctggggttcagaaccgacttctctgcccctcacttccatatcccatttaataacctgacattgctccttaaatcctggagggatcagaaagaggagggcttaatgaaggaaactggcaggcatttttctgccccttagggtggagagcaataatttaggggtgtccagaacaccttctactttttttttcaggcttcaattaatggagtccccagggttatttttttcttcatattatgggggagtcctccattgagaccgatatttaaaaaagcagctagttccacactgaccttcacattttctatttccaagtccccactaagtcctatagaatgctgtttcggtggtccactgtgcctttacgttgttcctcctcctggaagcttgtccctttctttactggcacctcacctgctctgcctgttacctgccatgtggcttttgcccaattacgaaagcaccttatgctttagttgtccagtctacaaaataaactcaaagctctggagacttaaacatggcttggaaagagcatagagcactgcttggcacacaggggatgctgtcaatcttctgtgagggtcccaggaagtcccacccatcataagaactcactaaagattgacgcaaatttgcgccaatgtgataaccagcttccggctttatcacagaatttggtctgctgtaaacgtctgtctgcctcactgaccagaaagaatcccccaaggacaaagcattatctccatgaattttgtattttctcatagcttctagcctaacagcaaatctctgctagctgaccgatcctattaggcactcaacaactattctttgaatgatggttgaatgtgtcccattcacagtcttctccatacagacctagggacttccttgcttctcttagacacaaagataggtaacagagaaacagttttcagacttttattcaccaatttaaaaaaannnnnnnnnnnnnnnnnnnnnnnnnnnnnnnnnnnnnnnnnnnnnnnnnnnnnnnnnnnnnnnnnnnnnnnnnnnnnnnnnnnnnnnnnnnnnnnnnnnnnnnnnnnnnnnnnnnnnnnnnnnnnnnnnnnnnnnnnnnnnnnnnnnnnnnnnnnnnnnnnnnnnnnnnnnnnnnnnnnnnnnnnnnnnnnnnnnnnnnnnnnnnnnnnnnnnnnnnnnnnnnnnnnnnnnnnnnnnnnnnnnnnnnnnnnnnnnnnnnnnnnnnnnnnnnnnnnnnnnnnnnnnnnnnnnnnnnnnnnnnnnnnnnnnnnnnnnnnnnnnnnnnnnnnnnnnnnnnnnnnnnnnnnnnnnnnnnnnnnnnnnnnnnnnnnnnnnnnnnnnnnnnnnnnnnnnnnnnnnnnnnnnnnnnnnnnnnnnnnnnnnnnnnnnnnnnnnnnnnnnnnnnnnnnnnnnnnnnnnnnnnnnnnnnnnnnnnnnnnnnnnnnnnnnnnnnnnnnnnnnnnnnnnnnnnnnnnnnnnnnnnnnnnnnnnnnnnnnnnnnnnnnnnnnnnnnnnnnnnnnnnnnnnnnnnnnnnnnnnnnnnnnnnnnnnnnnnnnnnnnnnnnnnnnnnnnnnnnnnnnnnnnnnnnnnnnnnnnnnnnnnnnnnnnnnnnnnnnnnnnnnnnnnnnnnnnnnnnnnnnnnnnnnnnnnnnnnnnnnnnnnnnnnnnnnnnnnnnnnnnnnnnnnnnnnnnnnnnnnnnnnnnnnnnnnnnnnnnnnnnnnnnnnnnnnnnnnnnnnnnnnnnnnnnnnnnnnnnnnnnnnnnnnnnnnnnnnnnnnnnnnnnnnnnnnnnnnnnnnnnnnnnnnnnnnnnnnnnnnnnnnnnnnnnnnnnnnnnnnnnnnnnnnnnnnnnnnnnnnnnnnnnnnnnnnnnnnnnnnnnnnnnnnnnnnnnnnnnnnnnnnnnnnnnnnnnnnnnnnnnnnnnnnnnnnnnnnnnnnnnnnnnnnnnnnnnnnnnnnnnnnnnnnnnnnnnnnnnnnnnnnnnnnnnnnnnnnnnnnnnnnnnnnnnnnnnnnnnnnnnnnnnnnnnnnnnnnnnnnnnnnnnnnnnnnnnnnnnnnnnnnnnnnnnnnnnnnnnnnnnnnnnnnnnnnnnnnnnnnnnnnnnnnnnnnnnnnnnnnnnnnnnnnnnnnnnnnnnnnnnnnnnnnnnnnnnnnnnnnnnnnnnnnnnnnnnnnnnnnnnnnnnnnnnnagaatgggtaggtattgcctttaccttttgctgactgtcaccacatgctcccttcggggccacctctcagggccactggcccagctgctggtgtctcctggagctggactgaggtagcttccccctgcagagggggctgtggacgggggcctcaggaaggaagcgcttcctctcccactgctctggctggtgaggctgccacgaggggccgcggggagaagccctggcaacacccgctccctcattgtccagtcagccaaagctgtgtaagggggctctgaggaggccccaaaccccgtcagtgtcctcggaagcactgccctgaggtttgcaggaggagagtcaggtggtgggaagaaagatgaggaggcacagggctgagtatccatgaaatctggaggtggagcaggtgtgggctcctcaagaggtggccagtccccatctacattcatctcccggaagaagggtaggctcaggtactggagcaggggtcctggacctggtaggggggctgcaggaggcggtcccacagggctgatgtctgaaatgcagagggattgtgggaccccactgggactgctactgctacagtcaaaggactgggccaggcgtttggatgaggtttgaggttctgcccgctccagacataacctttcctgtggaggggccacagtaggtcccatcacaaagcgaccatctgggccccggcaaatgggctccagtggtaagggtccccgaccaatcggagaatcagggtgggggctaggaggtcgggcaggctccccccaaagcagactctggcgtaggctggggaccggggagccctggagcttcaacttggtcacactgtcagggctgctggagccaggagcagagctgaagaaggacagaagatcagggtctggccttgcaaggtttgttgcacaacagagcagagctggggagagcaagcaagggcggggccaggtggtggaaggaagagaaacaacatggactagtccccaagccggggccaacacacgtctattcccacttccctctaatttctaattctttctgagtgtacaacatgggaagcaatgggaaggcagaaggaagaagaagccaaagaaataaagggacttactgtgggcctgacttcctaggtgaggagaagatcagaggtggatctgtaaggacaggagagtagcaaggtgatccgggtaaagttctgcccaagttccaggggtgtaaccctcggcctcattcccagccaactgggaaaagggcacgtaggggccaggggccagatctgaaggctgccgcaccaggaccaagtaaaaagcagctggtggctgggcaacctttcacgtggccaagtagtacttaggaccccagtgatgagggtggaggggtgagggcagcctagggaagagagtggtggcacctaccctggcgcagacgttttctgtggcggcgggcagccctgcgccgattcatgaggcaggcagccaggatgctcacaaggactgccacgcccaagaagcagaccccacccacaacaccagccaatacaggctggggcaggagacctggtagctgtgttcgggacgggtacacctccaggcctgggcaaagggacaggaaagagggtcagggacctgggaatgcccacctagcctccggcaactttccctcccactgggttctcaccagaagtggagacgttggctatgttgctgggatcactgacatagctatcagcaaaggccacgaggcggaactcatagagcacgtcctggggattagaggtggagagccatggagcgcttcagggccagcactgcccaccacagtcccttttgtgaagactgcagtggggaggtaagagtgaggtaggacccggggtgaaaatggccaagtcaggatgagaagacgggattaggaccgaagaggacactgtcaagtccctaggaggaccttccctgcctccttcacacaccttgatgaggccaggcaccaacagctggatttctgtgcctgccacagcttggtccaatatctcccagccttgggagccttgccgtccttccaggacatagccatccagtttcttagggatgagttctgggggatcccaatgcaggagtaccccgcggggtgtccgtactgccaccaaacctctgggaggggacaagggaggtggcatctctgttggaggaagcctagaggcagctggtgtggtaggaagccctggatggtacagacggacaaacgaggaataagaaagagtctcagagtccttcatgctgctcctcccgtggccttcgccaactctgagtacccacacattctaccacagcctttctgtaccctctccggatgccaagcatcttagcatctctattccatctccaccccaggtcccccccatgctgtgcctcatagggttggggacctcttaccttccggtatagacaggacgatctcgctgaagggcccactgcccagcttattctgagcaaggacactgaactggtactgaatatggggttgcagccctggcactaggaggtgtgtagcccccataggcacagccagagatacccagtcatggtgggctcggtcaggacgcttggccctggggaatataaggaaatctcatcggcaaggaggatggggatggtgcagggtccagagagctgaccacacccctctgctcaaccaccaaggtctcaggacctcggccctgaatgttgagaatctatgaaaataggcagcagagctaacacgtggctaggcaccgagggatggaaagaagaaagggagggagggagggagggagggagggagggaaggagggagggagggagggagggcaggtcactcacagtggggtataccagacactgaatctctgcagatagccaccatcaaagccaggttcccaagagacattggcgcccttgggtaaaggtaccacagacacattggtgacgacatgaggactggtgcctgggtaggggaatggggggaggaatgatgatcaggaccctgaagtagggtaaacaaagagtaaatcggaggttctgtcctccacccatgatcctgggggatcccatgcccacaaatccccaccacacctcccaagaacaatacccccatctcctgtttcacacggctcccccagccccagccagtgcactcccaggccactaacctagcacatagacattggtagaagtggccacttgggctacggcattgctggcactgcattcccatcgtccatgggcctccttggtcagaggtcgaaggatgaggctgctgttgctgtccacctgggcctggccctgcagcccccggcccacctacagaaccactggtcagccctgaggacacatgcagccacccctcaccaagggggccactatctttccagatatcttgtcccctccccacactgcctctgacaccctatgccttcacacatcctccttgccccaaaaaacaaccagaggggcagtgggcgcgggcccaggcagaaccgagcaggattcaggagccttaccttggcccaagagacaacaggaggagggtctccccaagcggagcaggggatgagtaactcccgccctacttcttggaaatactcttccttgggctgctctataaaagccgggggagcctgcaggccagatctgtattgggaggggcctctttcacagcccctttcatctctaagcttggatgcctcccactcccagatccccgacactctgtcttagtctctaactcattctccatctcctcagctctgtggctttgctcccagcaggtaggacagcaaggcagtggtgggctgggaccagactctctgagacagatgagtctctacagaccatcctccctttcttctttcttccccctccctcccccctctcctctctccctccctcccctccttcttttcctcccctttcctgctttccctgtggaactccggcaagggaggccgaatgcttgagatgagactgataactcattttgtgagtgtgtacgtgactgatgtcccactgccggtctcatctctgcgaagtttgctggctgttgctatgaccaccacaagaaacagacttaggagcccctcccacacctatctgcctgactccaccctcaatgtggtttagaacgaggccataccacagcaggtttgctgtgatgctcaccttgagcagcacccgggtggtaggggagggtccggcagtaccgagactgttgtagggggtacatgagtattctcccaaggcatcctcgttccccagagcaatgatgagtgagccctctgggccctgcgaccagccagggaactggcaggcagaggaaatgacaagtagagagactcaacagaggcaaagctggggtggagagaggcaactcaagagaggaggagaaatgggaaattctcttgtagagagtcaatccatcaactctgggtcttggcctgaccgtctcccgactctagacatccacttctctccagtgccactcacggagaagagcacgaatggcatccctaaagttggccacaaggggtttcctgcccgctgtgagttccctgatgtcctcccagcattgtggtgctaagttctgcgtctcctactccaaatcctcttctataagaaagctccccccccttctcctggctgaagtgcagcccctcactctccttatctaaatacctgtccttcattctggtctaagtatgaaagcctttctgttttcaggtcctctctagctcagacctcataacccttcacccgaaccatctgagctgcttggcagcctcccagctgccctcctaactcctactcacagtccctataccacaccacaccacccacccaccccaccccaccccctccaaaaaccactattgctattgccttaagatttttataacctttcaacaaaaatttaccaaaaagctacgatcgtaaaagccctggggacactatgatgaaaagatgcaatgcctccaggaatttacagtctcctcagacaaacaaaagatccccatcagcttggaatgaggtcatattcagttggcatgcagttttcctttaggacccaacctgtctttccagccttctctacaccactcaagtccctacaggtgctcactgtagcccccacctcacagaatagttcattatctcatcgagacactctatagaccctgcctctgcacggaatgactgcccactctgcaaggtgggcactgaagtcccagaatttgttactgacctctcttcaaccggacctaaaagcaaaaaggcctttttccttctctggcctgccaggacagtctctgtcgcagttctatccccgaggcaatactctagggatgggtacttctttgttacacccccacatccaccacctaacacggtatctggtaagaagtatgaagtttcctaaccatagtgctgaattacactcagccacccattgcagctggccctctgaccacaataacacctagctccttccgctgtcccgagtcagtaccttgtccagctgcaaggcctgcccatctttggtccaggtgacaaacagcagtggggggttagcacgagctggacactggatcaccccccgcatgccgatgggcaggagtgtctcaggaggcataactgtcacctgtgctgggtctggaagaatgcagagacaagttggagaacaaggtcttgggtctgtctcagggggtagcaggctgggagcgccggtgggaatctcggctcagacttacagagcacagtgagataggcagaagccgagggtggatgcagaaagccattgctgggcacacaggtatagtggccagcgtcatcaggctgagcggcctgtagccacagacttccatctaccaggatccgcactcgagactgtaggtggctgcaatggggcatgtgtaaggaggagcccagggctcgtacacacgagtccctcagctactattcatcagttccttgactctaccacccaagaggtaggtgaccctacctaatgtggaagacattgacgccatcctggaaccagctgtaggtgaggttagcagggtatgcctcagcctggcaggccaaagaaacatcctgggagacattgaccgtagtgttgttggggggcaccaggatgacagggggtcctgagggcagtagaaaggcagagagatgtcctcgacccctgatcttcccagaaccctcaggatacttctacacctcttcctggggcatggtgcttgctacagggccttgagggcctgaagcaggagatgtgataaaaacccattctattccaggggcttctcccttttccaagtcttccttgtttcaccagaagtgacaggtaaccatatttaccctcttcctgtctgcttagaaagtatgtgaaggagggtcagtcttaactctgctcatttactctgtctctccctgtcacacccatgcctcccacataggtacccatacatcaccaaagatgctgtaacaatgccaagttctagattgccccgtcacctcaacactaatggccattcacacaggaaggaccccatttgctcacagaaaatgttcaccccagtgcctacccataacccccacctggccacccatctttccatatgtccgattcatcaggccagtctgggcagctggctgtccccatgccaggcagattccttgtccctggtgaatatccagcacaccatttcctaaagtccaacccagccgcacgccttctgcaaacctgtctctagctaccatacccccgttgccttctccatcctggggccccagtgcacagccagttagtaacaagtgggaaatgacccaagcacacacagagagcacctgccacaggctgcactgagcacatagcactctgcttgcttatctctcgagctctcataagaaccagtgtgtcaagcaccatctttctgctctggcaggtgaagtagtgacgtttcagaggcagacacattaggagggacctcgccctaggtcaaagtgggaggcaagacttctacttgggcttcctgatgccagggtctctgtgctttaactattccccagcactgctcttgtcaagtaccaaggacaatgacactccagtgatcacaaattaatctgtttcccctccggggaaccaggtgctatgaagacagattcctgcctcacacagctcctttgtgcctccttcccaagggacgagctaagcacgaatgactacatgtcacttttatgcttttgaagtcctgagaggtaggtatgaacctctattttgactcaggaaagtcccttggtttgtgacctaacattagcccatgtcctttccgctgtgacacactgctgggcactaaaatttcttcaacctttccttccccccacaggggctccttcctcagatatgagcctccctccccatcttctgtgtgattccctcccaacacaggtcacgtcttctcacaaaggtggcccaggtctccagccctcccaccaaagagcacctagcaccagcagttgtgtggtatgggtgacgctgccctcggtgctggaggcttggcaggtgtagtctccagcgctgcctcgctccacccgacggatcctcagtgtcccgttctgcacctaggtaaggcgtctttaagacaaggcccttcctgtttggtcagcctcacaccctgcacttccaagactggccagcagagggaggcagcaccccaggctcagggaaatcaatagcaagcccctcctccgacccatctccaggcttggcttctgccctctcaattttgccctcccacactagggggtccactcacttgcacctgaccctggcccttgccaaggtcctgtcctcggaatttccaagtcacataaggctgggggctgccacgggccacacagcgcaaggtaacagcctccaattccttcacttccagttctaagggaggcgtctcctggaactgagggggcgctgtgaaggagagaggcgtcaggggctgccacaaaggctaccagtccacaaagcagcgttcagaagccaggaagacctagctgcctgtccaggcacatgggagtactagcccagggtcacctgtctgctgtacaggggacacaggaccatcccaacactggctgcatgtccagagctgggggagagccaagtgtccaggggagtctgggaatcaggaggtgggggtcttagactcatctctgccactcatcggtggcacaagctgcctctctacctgattctccgtctcagtctcgcctatgaaatgggaatggttacaacggtctccgaagaaagaaggtctcggatgcaaagtgctgtgcactggtgagcagcaccacacagggcccaatgcaccataaccatgacctcggccggggagtggaagttcctgactcagagcctagaggctgattggattttatctgaagaactgaaagggtgggagggagggcggggttaagaggcaagcactaagagcaaacagtgagctgagcaaacgccgatatggatagggcatcagcactgcactaggatgcaaatagagctccctcttcttcgtcactaccagggtccccgccattcccctccctccctgcaccacctgctcccctgcttcatacaattgactgtcaggtgcacccaggagccgttggcaaaatcctgttcagggctgtgttggtccaggaagagcacacgacactcgtaccaaccctggtcttccacccggagcccctcaatctggagagatgctcctgtctgcagtcggactcttcctgtggggagggaagtcctgaatcaagggtgcggaaggaagggactctgcaggagctccccagtcctgcttacacaggccattcccagagcttgagaatagcctaggcctgttatccaagaggaacaaataggattgaggtcactgagggcagattgctatgttcaatccttcgcactgctcctgcctttcaatagctgagacccagaccggagaaagtcaaggcatggtgagttgccctcaaatacgccagacttcccagaccattagggaaaggagtgaagggccagcatttggttacctctggactccctacaagatttaccacccctgagctcctttttaaggtatgagtcctctgcgggtacactggctttttgaggtctctgtccctggaatccccagcagcgtttggggccctcccagggacccagacctcgcctcccaaagcctgtaatccctcagagctattatcagcggcctaagcgccttagagtggccagagtccagcccagccaggcagcagcgtcagcagccctctcaatacatcccatcccctctacgccccagctgactgaccacatgcagtcccacaaagccacacaccccagcgtaaaaagacgcttccttcccaccaggtcagcatccacagcacaccaccaggcccaccaaggtgcccaccggatccctcagtaccctcctctgagggaaccctgcaccctgacagcattagaagtcccctagcagtgcagtctgtgagaaaggcatatgcttggcagcccaaaatacccaggcacgagtccagctcagctgtatgctcctttgggcgagttactcgacctgccaattttagtttcctcattagtaagaaatgagaaaggggaaaattgggatgaggtggaaggcaagagataaggggggggggggctcatagcacctggcatcactggacactcaaataaaggctgtgaaacaaatgaaagagatgcagatttaaaaccagaagtctacactgaaggtgataacatatcacctccctctcctctgccacatcagtgaactgtaccaccatgctccaggttgccctgtggcggagcctggcacagcctggattcctctgtcaccctctgccacatatttattttcatctttcaaatcctacctccaaagtatcagtgtttccctttctgccgccttccacctggacaccgcagtgactctcacccggggtgtccagctgcctgccccatcccccctacacttccagttgcccatcctcacttgacctttgctgtaaacaaatggaattttctaaaattcacaggacaggcaaatgtagctccaagatgatgccttcagagttccgcctatcccaacccttcctgacacaggagcaaccctaaagctgctggggaccccctccctccaagctgtttgcactctactcctagggtggcctatctgaggtagaaactcagcctgcttgcccttgatgccaccggaaatgagagccataggatctaggtggctagtaggccttttttcttctgataattagttcctagggtgtggattctttagaatgggtggaatgcttgttgcaagtctaggtgtataatccccacccaaaagataaaaatgggcctagcaggtaaatatttaacataagaatacccttccttgggctggagagatggctcagaggttaagagtactggctgctcttccaaaggtcctgagttcaattcccagcaacaacatgatggctcacaaccatctgtaatgagatctggtgccctcttctggcctgcatgtgtacatgcaggcagaacactgtatacaaaataaataaatcttaaaaaaaaaaaaaaaccttccttaaacctgcaggactcctgtcactctagtctgccaggtcactgagcccagcagaccccagactgcagcatcctccatgccccacctgacagaacttttcattatgctaatctctgagctccagagcgaaggaaggaagactgagcattgaatatgagccatgtgatattagacagtcaccatatttaatcctcacccaaaagtccattattgatgaaggaactaatgttaaacttctttccaaaaatgcacagctattaggagatgaagccagttctcccaaatcagtgtgctttccactgaacaccaacatgagaatcaaacaatgctcagggcactgagcatagtctctgatttcacttcagtgttaccagctaatggctagcagtcctgacgtctgttagccggaatactcagggcagctggttgcacaaactaacctccctaggaggtccagactgctgggctacagtgtttcagaacaagaaggtgaccagagtggcagtcctataccttcctgtctcccgacccacttgctatagggcttccctccacctgcatggccaaacctaatggacttcagatctgcctacataggacagagtctgctctctcgggctcggcagaggcaagaaaccaccctaaatttaaccatgaacagggacaagtgtatgttcacacaaaagttgagcatggcagtgacttcacaaagccagaggcaaaagaagcattctgggaagatgtatctcgacagcccagttagcaggaccaaaggcagaaaggggggattttattagcgggagcttgggcgttctagatggacagtcagaaatgattgatcaagcaactcaccatagtcatgaaacataagtcccttctgctatgacaagcatccctgaaactcagtatgaaaagcaaggaccaagagcctgcctctctgactctgacttagtccaacatccatcccaggaaacctggctaactcggattgccttttcccaaccccagttcatactaccctggtgctatgcttaatactttatatactaacttcatctattagtcctagatcgttttatgctgccttttactcctcctgtgctagtttatacatctaggttcctctgctaaacagtttctagagccctctaaaaccagctttcccttcagtgtggttcccaaagctactatctctctcatggctcctcccacattctaggccaccagtctcatgcagtcccaggccatatcccctccacttgcccacagggtttatgacagaacagcattgtcctcagcaacctccacctcctgttgcttagcaactgcaattgtgagtcccctgcacaaaggccgagaggcccccttctgaagtgtgaagcaataaagggttaatgggctcagaggcctcccgtctggggtctttaccagagcaggacccatgtggctggtcaggaacttcagaccactcaggggcaagagcgggaacaaagggtagaggtaagaggaaaactcaaaggcttgcaactcccaacccttagaattggagaaaagccacaggtagacagggaagctagccatcttgtggcgtatctgcccagggaccaaaagacaattcaagactgatgctgtggcaaagcagaattttacatatcccaggtagagagagtcccagggaaagcccttcccacctctcctccactcccccctgcctcgcctctgcctggtaataatttgaatttgtccagcctcagctctgaatccaaagccccctgggcacagacaggcacagacagagaggcccgctgtgcctgtgctttctctctccacttgtgctaattgaggcccactttcatcaagcccccagggcttgtgtagacacatacacacacacacacacacacacacacacacacacacacacacacacacactcccccaaataggctgtttgccaataactgcccccagtttgaaaataaactctcttctgcagacacctgccagcagctcctcccctcagctcagtcagccagtgacaagagcccagccaatcccaagatttccttcaggattcaaacccaagatagaaaagctacccaatcagcatctctccaggtgcccttttctgggtttcactcatgaaaaggaagtaccacagctcgctctcccctagaagcccagatccatcctccaggccctctgagactttatagtaaaccactccaattaagactccatccaggatcaggaacaaactggagtgcagcaagagagaggtggtcttctgctgggaggtctacacagtgcacctgctccacgagagcccacgagagctcccaggaacccccgcctgtgttcatgttctctgctactcggaatcactatgctcctgatacccaaagagcccacatccctacccactctgccgtccctttaacccattccctaaaagcctggagcctccaaactgctattctggacagtagggaagggaagacacagagcagcagacagtagatccagagaccagcacagggctaagtggggaaactacagaagatcaagatggagtctggaaggttgcatgagatgaggatagaataattagcaagttgggatggatacctgaaatggagatgcaggatctcccgtgcatgccacacgccacacatagctaaaagatcaaatctctaacgtgcccatgcatcatgtataaacaaatgaatccttcaatgggttagcatctttgaggagcagggccatgcttgctaagcagttagggtcacggagcaggagatgcgattggagagggcacagtgcagcctgcacagcccacctttgttggtgacactcccccccacctcccacctaaggacaactcttacccacgtaatcagggtcaattcggggagagtagaggccgaactggatgaagatgggaagcaggaatccaaagcgcagccactcgatgacatgcagaggggggcggccagctggaggcagcaagtcacagcccagaactgcactctccccagcccggcccaccacagagaccacctcaggcttccttcgacctacgtggtgggtagcatgagggaagagcaagtggtcacaatgagatatgggagaggaggctccatcaacatctctctagtttccttaagactttgcatgacaggaggaaccccgacctctctgagccagccctagccctctcctacgctcacaggtaaccccttagtggtcacatcccagggtaacagagctgatgatccccgggggtctggctcaccgtcagccccctggctgatgaccaggctgaggatggtcagactgagacaccaaatcatagcccagctggcctgctcacccggcccctcctatccacaggagcccagatggaggggccggaaggatgttcactgcccagcaatcccagagagcatcggtcgttctgatccgcctcaggcaaccagtctcagctctcactcctccaggtaatgcctagctcatgcaacacctgagggagctggtccagtctggagagccaccagatctaaatgcaaaatataaggcaacataagagctggtcagtggaggagaccagaagaaagccctgttagagcaaggcgcagggaagaaagaaggtgtagaggaaaggaggggacctttacagaaaccagagatcttttgggttgtactgctggggatcgactctggggcttcattcctgacaaactccaccacagctacactactgcctccaaaccagacatcctgaagccctgagattaagccaggatgtgaacacaaacaagagtgctatcctgttgagacgacgacggacacaggtaagggaaccaatgctggaaaaagcaaaggaattctggggaatgcctggcaagtggtacaatgttgttagcaaagtgagcaaagagaactatgggttctcacacaggggaagtcctggagatgagggccattgtgcactagcctcctcacccttctttctcctgatgccaacaaggtaacagataacaagataaggccattattcatcaccaccctgtgtgaccaatagggaccacgaggatcttgctcagaagcagacagctagtctagaggaaatctcagatagactctaaccccctaccctgcagagagtctccacagagcacccaaaacatccaattcctcaccccatttcccgccctctgtgttgagccctggaccctggagacattgtccactcaaacaacgctgctgttggcaatgagttagtcagggatttgggagaggaggagcttgccttccccacctgctgggggatggggggtgggggatgggagaggggtgcagcatcctccaggtctggacagatccagggctggcagctgtagcgactttcttcaagatgctgccagagagccctccctcccccatacaccccgacttagtgcctcaccctaattactcccacgcactcctctctagtatcctgggggtgccaggatttgccaggccctccattccctaccccttgaggcatgatctgagagaaatacaaaatgaaccctggagcacagaaggtaggcatcccgaacagtaacaactcctcagcgtctaagacaggcacaaagggccaaagggccctgacctgggcctggcaaacccagtggactctgctctgaagcctccaccctcttctgggcctcacacaattcagcgctgtctgtaaaataccctccaccctccacgaggcagtatcgcccctgtatgcctgggccctggtacttaattccctttcctccagctgcacccatccagctctcctggacttccctggaaaaccttccagttgtaccctatagaagccattctcttctggctcgaccaagactcttgtgacatccccaggcatccccagaatgcatcccacttttcctggagcctttccagctcctgctccccacccacccctccgtccttgtgatcttctcgtcccatccagcactcactccctcgcttcttctaggactcccatcccagccacacacttttcacagtgtctgcaaaattccagcctctcacacctgatctccaattgcagcaggtcctcgcttcaaaagcacccttggctggcctcctccagaattcccctttcccccaccctgctctcccgggaacctcccaccccccaatcctgaggactcagcccacaatacacttctgattgtctatcacaacaattctcttttccctcgcattctctggctcctggaacgcctttcttctggaacccgccaagaacgcccctaaattacctctaacattcttccagatctcagggaaccccccactcacccatcagtaattccacttcgctcccagaactaccctagttctgcttccccagataatttcacttctctctagagctcccccgttcctccttgtcccccacaactcctcactactccccatgtccccgccagtaccccaaataacgccccaagacacccccaccctcacctgctctgcaccgcacagctctgctctcgcagccacacaatagggggcggacccgcctccccgcctcagatgccccgagcgcctcccgtcgccctggagaccgccaatccccctcccgcggcgtccaattggagccaacagaggccgggtaaggcgggcgggacccccgagccgcctgggagttgtagtttggagacagaaggacgcggtcgcacgtgggctccagtcgccctctcgtggagctctgtacaactaagcgtggggagactgatcgccgcttcccgcctcgactcggatgggctactggtcagaccgaccggtgcaccaagagccgcaggagcctaccccctttgcaggctgcttgcatgcatgccctccctcctatgtaacttacctatggccttctcccctttccgaacgagcgtgccacaaaggaggcatcgaaggttgaaatctgagcctggggcaggagcacctggtgaagagcaggattccccgccccctccctggggatccacccaagtcccggacccatctgatctctctttatccccacccccacccatttcctctcgctcgactggaaatacctgtctgtgttggctcgctcccagcttttgcccaggcgcctccctgtgtgtagcttcctggaggctgatcccctagtgtggggctgccggggcagcttctagcaccaaggacttgaagaaataagtccaggggggaagaaatgacaggcaccctaacaacggagacaaagagaaagaatgaaatggctgatccgtcactgaaccccttgcagggtgccaagccccggggtagattcatgctgtactgtagtacattgctcctgtactctgcactgagaccccgcgaagtgagtgcagctccctctgattagggagaaaacagccaatgcaacaagagttgccacctaggcacattcagggcctgcattcagatccagcctggatcacggagtccaaccgccccccccccttggacttttcacccacaggaatgtagtcaatgaaatcggggtggggagcagaccctgaggaaagattgtaagcacacccgaaacactgtcacaccaccctctacggaggccatctgatcctattgctgttgttggctatccatccttagtaagtcctgagagccggaatattcttccaggtctaagtgcctgagtgttttgagacacacaaagaacttgaactaagggaaagaaggctggagcagaaccgcggtctttctcactaccccaacaaggacctggaactcgtggctttgcgactagtttgcagagtaggctgccctaacagttggcaaggtgacgtcatgttaggaacagcgcacaagggaagtctctgattcttggttccttaccaattggaaggcactgtccccaccactggtccaagagtttcgtttctgctgtctgcagtggtttctggtagataaactaatctcatgttaaaatatttttttgtgtgtaaaatgagattttaaatggttttcgagttttataggtttatatgttcatgcttttcccgaaagcttggtttattattattattattattattattattattattattattattgtcatttttgtctgactggtgtatcttccgtgtttgttttgtttttgcaagaaagggaacctagtcctacgacctgttccctccttactccagaagtgaagttgattttttaagatagtaatccctaaggtcaaaactgacgatttccctcccacttgtccttgagccatagtgactgctcctctggaaaatgtattcagccaaccaggactgcatctaatatattagccagcttttatatttcaatttctggatgagaatatcagagaatagtgaacctagggagtctgttggtaatgtgtccatgagctctggtcctcacaccttttagaacatgtttcttacatactcctgtgtcacagtgtgtgatatggccatctctagttgctatgatccctcaaatatgagcatcttggtgtatattttctgtctggcttgaatgtccattccccagtttgcattaacctattttgaataatgagtaagagtatcttccatgctgccagatgattatcctggcttctgagggtacactctcttcgaagtctaagccttccttctccaggctgtctgttctccaggctggctttctctattcagagattggctctgagaataagggactctgccaacttcagggagatccctggaccagccacacagggactattcatttctctatttgctttctatttgccagctcctaaagacaagagaaatgggctgtccctccacatgaaaaatggactccaggtagtttgcacaggcaggccctcacctggcagtgacaccttctatgacaggcatgggaagtgtcagaagttggggctacagacctttgttgaagacaggactgttcagtacctaaagatggcccagaatctctgaaagagctccaagaagctacacctatgtgtgtctttcaagtatgtgttctttgtggaactgaactcagggtcaaaggctaaacagtaccctaggccagaggaaagtggaagagcaaaacctaggtctcctaagatctcacccagttccctccttggtgcatactatatcacctccaccaattcatttagtacttacacctgtcctattgagtggcttctcttgtataccctcctcctctgaagcctggcagttgcctatgtaaaatacccacaatctaatttgggggaaacaatataataggaacatcaaacctagggctatgaaaagagcaagagtaaagagctctacattgaccaaagactccaatcagaaggcccaaaacggaaatctataagaaaacaataaaggccaacaaaatcaacttatacagggattttttttgtatagcccctgactgtcctggaacttgatttatagaccaagccagcctcagactcagagatccacctgcctctgcctctcaaatgctgggattaaaggcatgtgcctccacatcgggctaaataatgtcaaccttaaacaaaatcaagggtacaagatcttagtaattgatccagtgagttgtcagtcctaccaggtgagcagcagggttcagagaagctggtatcagggagacaacagaggtcactaagcacgactatatcccagagaaggcctgagcaggggattccaccacctccttgtgagacagcgtctatgtagatgtggtagagtaagtaggcagacagttaagtggagttatctgtcagaatgaggatggggtagagtgagggaggtggcttgggcataacacttatgcagcattctaaatgaactgccatcacagttcagctaggtgagaaagccttttatgtggtttgaagtattataagacttggttagtgaagaatgggctacatgtagtaaaaacaaacacttctctctaatggggtcttcagactcagtttcctgcccaaaggcaagcctgagaagggtcatgggtttcagtaacgacccctggacaggaagtgaaggtgggaaacagtctcccagggctgtccagcacaaacagaagcatcaagcacagctcttccagagaggtgaggacttgacttttattgccagatggtgtctctcagggaacatggccctttcaggtgttcaatcccaatcctccctcccacctgtctcccagatggtttccctggaggcaaagaagaaacaaagctcaggacagaggtccccaaggggcgatcagtctagactagggccaagtttccccttcttcctcagtttgattctgtttctcttgagtttcctcacccttgacatctcatagtttttccgggcttggaagacacagagcaccacagctagaattaccaagaggaaaagaaggatcaagcccttagccaggaggcaggacattgaaggcttctcaggagagccaggatctaggataggaagaaaggagaagagtttattagaagaacggtacgtttggagagcagacatctacctaagtgtcacagggaggctcatgggttgataatcagcttgtgtcttatagcaaacatctctagaaatacctactctgcacacagatgctcaagaactggtatctcaagaacagatatctgaccatcagactcaagccaagtgcagaagaatcctttggaaatccagagcaattgacaaagggagggtccctccccaatccagtagcaaccctctacaggagattgtcacattctagagtacacatactctccttaagagccccaggcatgggaggaggtggtgtcctaaggcacaggacttatacaagctcagaaattgtctcttggggtctggtacctgcacagaaggaccccacagggatgagatgggaactgctgttgctgacggggttgctggccctacaaatataggaaagcgctctgtcaccaggcctccaagatgtactgatgatagcgtcttcatgagacatgttagcgctgtcctgtggtgaaagccaggtgtaggtcacatccatgcctgctctctctacggagcacatcagggatatgttacaggcaccttcctcagagatcctaaagttcacagtgatgtggggctttgacagccgccctaaaaaagaaaaacacaacacaacaaaacacaaagacctggtgaacgttctgaagttgggtctgttttcctaagtttctcaagccttgggtattcttgctatcttgagataaaacaagcatatagcttgtggttttggggtcccaaataatctgcttagacagatgtacaccagtggctccttctaacttcactctcttcattttacacccctccttcctccagatcctcttctgtcttgctgattgtataaaatattaccgccctcccaaagacatttacattttaatcatctctccaagtcctaagtagattcaatgtggcaggtggaaagaagaaatgttggttcaagtggggaagaaattattagcaaccctcaaatcacacagggggataaagggctcaagagctgtttatgtagaggatgcacagtctcctgggtgggaaaggacccttaaatgctctattcatggtcctcatctctctcactgctttgggaatatctatggaagcagcctcaggcctagtgcctccttgttccagctcactctccccgtggctgaagctcagacactgggacagagcacactagaggcagtcttccttccaatttcagcctctaaaacttccctcagctcccgagcttccatgccaacctcgggaaagccagaataatgggaatctaaactcacggtagacacggagatcgtaagacttcgtgatagagagctgggatgtattcaagctgactttggcttggtacagtcccgagtcctcccaggtcagattgctgatatgcagagagtagctggactctgagatgcccactcgaccctggtatcgaggatccatcacaatgatgacagctggtgttccctctttccctggcaccactgtgacaaggtttttttgagagaaccagatgatgtccttaacctcttcgttggatggtatttccagagaaaggctgatagactcttgaagagctgcaaccacttcctcagggtcctcatcatctccagaaaaccctttagctgcaaagagatgcatagcgcccagctgatatccctgggaggccaaggctagttagcagggtagctacggctcctcctcctctgaacaccttctctagctccatgctcagtgggaccctctagctacctcttggagttccagattaccattgcacccaagttgaccagggatggttcccatttatctcttcaccatccaaaaactttctttttccttgtccttctggaacttcagccccacccatgtcccccaggtatcctcccctctcatcctccgctgaggtcatcataccccatcccttggagatcagaatggaagttcctccacactagcttgggatccagctatatcactctcaggtacatactcggcacaatccaagtcaacatactacagtgatgtgtgcacatccacgttattgcagagcgcgtcacattagtcgagctagagaatgagcctcggtgcccatcaacagaaggactgacacattcatccctaaaggaagggtcttgctagcctaagaccaagtagagcagaggactacagagatagtcttatgcagcaacaggctcccactcaccttcctgaaggagcagaaggagtgaccagagaagggcccccatgtcagcagctcttgcctaggaagagtgacttggtcagttccccaggctgtggacacacaagctggtaaggggtacctataggaagaatgactgattgatattgacaggaagcagagaggggaaatacttctcactccaacttcctctgtccccattaagcccctccctggcccccatggaaagacatttctccccagactaacagtcagatgacttagccacagattcagattgcccatcccccaaactcagctcaaatctcacttcctaataaagagtgtctatctccagcgctctgtatgtccaggtcccatagaaatcatatattcacaccctagcctgctgtcggccctcagggtgctctcccaccacctctatttcctgtgttgctgtggtctttatctcctcagattctatttcctctgtacgtttcactattcctggcccctgttgaatgcacgttcacagtattagaatggatgagtgagagaagtctttctttctgtttaaagctatttgtattcccatttgtgatgctatttggggatgggggattaatctcttttttttaagaaactgtcaccagggagtggtggcacacgcctttaatcccagcactcgggaggcagaggcaaggacctctgtgaattcgaggccagcctggtctacagagtgagttccaggacaggctacaaaagctacagaaaaaccctgtcttaaaaaagagagagagagaaaagaaaaaaaaactttcttccatccagctttctcttgctcaagtgcctacagaacacagtttatgactgtttagtggtggttccatctgattcagcaccctgcacagtgagggctgcaaacttgtccctagtgaccgtctgaacattcctgttttcactggggaactgctggatgggcacagaggacacttgcacgccctcagaccagtcagccacctccatctgggagtggtagactcaggagcaggtgcagtccattccccatgacactccctcttggtcacagccttttcagctgcacttgctcttccttttcagtctcttaggatctctacagaaatagggatcgggcatgaccagatgagcaccactggcgctcaccggagatggtgccacaagtgtgcagaccttcccaagccagcatccaccagcatttccgtgagcacccttgtttgttgcatgaaatggtaatgtcaacagcacagaggagaatctgttacacagagcaagggtgggcaggttggcgtaaggccttgtgaggggctggtggtcagctctgggattggtcaccaccagaagacatcactccctgaagtcctcttagatctgcctagtgaaagtcctaagagtgaagtgaccagcatctggtgtggctccagtggtggcagcaaacttcagctggctggccccaggagttcctggaggagatgttgaggagatgaggctgacatcagcagggttctcagtggcaatgatggctggagctatcagcagcagcttctcctaggtcctgctcagattgattacataaataccatcactttgccttttgcagatgttctgttccatttgaaagtcaaggttggtgccacctgagtgggttcctactgcaaggaatttgaggacatcctctttccgcacttgcaggacaagggttccagacatcgtgtgagtttccctttaaattataatgtgaactgagggaaatatcatatagaccccgactaggcagcatgaaaagactgattctcttttaaaatactgtctcagtccggcatagtggcatacaccttttaataccagcactcagaaggcagaggtaggtggattgctcagagttctagtccaacctggtctacatagtgagttctaggaaagaccctataatggcaataataacaataatagttctttaaaagactttcagttaggattgttaatatcatagaaagattttaaatcattcagattatcaatcttgatcaaagacatagagaaaatcagatttgagaagagattgtagagaatcaagataagaaaatcataccctggagaaaggagctcctatgtgcactcttggcagtgtgatgaatggttagcttcccatgtgtacttgacacaacttagaatcacttgggaaaagagtgtcaatgaaagatgatctacactgagttagtctgtggttttgtctctggggttcactgatgtgggaagacccagccccctgaaggcagaactattccctaggcaggggtcctgaactgtgtgagaggttagcacaagcaaagaagcaagcacgcatgtgctcctttctctcttctcttgttaatcagaagtgactaattgtctcctgatactgctttccctgctttgatagactgcaacctggaatcatgagccaaaataaacagctttcctctaggttgcttttagggaattttatcacaataaaagaaatgaggccatatgtagaactgaaactagtagaaatataaattaattgggtcagtatggaaatcagtatagaggttctttaaagaaaaaactaaaagcaaaactatcatatgatatagctataccattcctgggtagtgtactcaagagaatctaagcatactgcagtgatcctgcacattcaaatttactgcaagggtattcacagtagctgttatggaatcagcctaagtgcccatcaacaggggaatggttaaagcagacgtgatatgaatacaccataaattttattcatccataagtaatgaagttatgtcatttgtagaaaaggaaatggaaccagagtaatcatgctaaacaaaataagctgtgggtttgggtttttttttcctcatattcagaatttacattttttgaagacatgaaagtgaaaggaagactgcttaggaaaaggaaagagagactgagtggggatgggagggacacaaaaaacaatcatagatagtaagtaaaatcagattatgttagatgcatatatgaaagcattatagggatacccattatgttggaggatatgtattaaggaaaaagtttaaatttttttttttgagctggagagatgactcagtcattaagagcacatattgtttttgcagaggatgcaagtttgattctcagcacccacatcaagaagctcacaactgcctgtaactccagcctaagtgatctggtacccctctgacctcctccttctgcacaaacatgcacacacacacacacacaggcatatgcacacacagacactataattgaaatttaaaaacagttaaaaaggaaggaaggaaaggaaagataagctttagctgtaggggtgcaatgggctatgtagatagctttcattccctgtattcgagctaatactggacagtcacttgttcagacggtctacagcatctctgacagcaaatggatcctcaaactggacagcctttaagtttctaccagtgttcatttcaacaagttctatgctatgacaaggaagaaaaaatggtattttgtaaccgtcttagtttgggtttttattgctatgaagagacaccatgatcacagcaactcttataaaggaaacatttaattggggtggctcacttacagtttcagaagttcaatctattatcatcatgacagggagcatgggtggtgtgcagatgtggtgctggctgcatcttgaacaaaaggcaacaggaagtcaactgagacactgcagtatcctgagcataggaaacaacaaagcccacccccacagtgacacacttcctccaacaaggccatacccactccaacaaagccacacctcctcatagtgccactacctatgagattatgagggccaatttcattcaaactgccacaatgaccaaaaaagaaaatgaaaagagcctccaatgagccaagttgaagtcaggaggattgaggaaaaactctcaaagaggaaagatacggaggatgagacctcaagggtgagaaaggtctgctaagggaaggggagagaacgctagttcttgtgctccaaattatgggtaccaagcctctttgatttggattgtctatagatacaggtcaggttttaacttgagcctgaaagtttttaaaaccagtcttcccatctatttgaaaagaaattagatccagcaatcccgactacttgatctgtatccaaaggaaatgaaatcaatatgttgaagatctatctgcaatcccacgtgtactggaacattagtcccaatagccaagaaaaggaagcaaaccacgtaaccatcagtggataaatggatgggtaaagcagatgtggtacatacacgtgatgggatactatttgaccttaaaaatagaaagaaacctcatctgcatcagcagcgatgaaccagaatgagttgtgctaagtggaacaaggcatccacagaaagtcaaatgtcacatgagcttagagtggttgttttcaggggttggggctcaggtcagatggggagacagtggtcataggacacaaagtttcagacagacacaaggaataagttcaacagatctactatacaacatgatctactctacagttaatctcatacacagttgatatataatattctcagaaatagctgataatagattttgtgtgcatagtgcaaaaaatgatttgaggcagttaataatgtgtcaatttgatttagtcaatccataatgtacacacacacacacatatacatgattcaaagcaacaagttgtacatgatgaatgtacacaaaattttaccagttttttttaatgaactatacaaaatttaaaacaagataaaaaagaaaacaaggtcatgggtgtgatactcagagttttaagagtccaagagtcaagaataaaggaggcttcatgggagagaaaatgcctgtgaaagataatggaggagaaagcaggagcaagttgggagagtatgataccatgatgtaggcatctcaatctgctagctcaataggagctccggctcagtgttgtccagtagaggatgccttagctagatcttgtgcaagagtatcatgtaccaatgcccaccatgtgtgtagtttcttggctggggctgccctagaagtggtgaaccttggaggactgcagctcaagactgtcagctcctaacactctttgcagatgaagggaagttttctcttgaagggagagcaaaaggcatctccattgctgctacagtaagtgtgctgatagccagagagggctgtactcacatttattgaacaggtccccataactataaatagctgattgcatctttggaaagagaaaaataattatctacatctcactgagctcttccaggccactctggagagagtcacttctcatgatttccaaagaagtgctgctccagctcatggattgtgatccaaatgaagctcccttgctctctctcactgccctttgaatcttactcatatctgcagtctactcctgccctggatgagaactttgcccttgatctccagtctcagctcagaaatgagaagttcttaggccatgtgatacattaaaactccaaacctaagtcacagtgaaatagtctctacccattagcgtaggaacacaatgggagagggaagtccctgtcccactcacgcttagatcaccacccctgccctttcctccttggcgctcccagcaatgtctcccacagctcatgattccatttccagacagatgggtgagtggggatgacaaattgttctactctgactgctgagttctgatggttaaggtatctctattctagatggtccttcacaattccttcctctatccctagacgtgtagaacatacctcccttcacaaacacacacatgcacacagaacacacacacacacacacacacacacacacacacaaacacacacactcctcttcaagtgcccctattatagtgctccctgggtaacaaagcaggcgatgtctcattggttggtcactgtaaatattatttacctgacagattctaggatctacagtgtagtaccatgcttctagctccctagttggagtcaggtcctcatccatagtcaattttaacttttctgggcctgccttaggctgctgttctctcaggctgtcttctgcaggggactcttccaatgtaacggatcctatatccaaggatgttgctttctcagttgacctctctccatggatgaggggttctcagagcagtgatgcaggttcttcttaatttccactgcaattctgcaaggggagatctggtctccctcactctgcctttgaactcccggcatctatcatattggcagctcaggtagacaagcaggaagggatccactccaacatctggtttataccatgcacttaaggttttctgcggagtctctttggcactggatttctatcctagacagttttttatgattaagccaccctcctccctacattacttgctgaagttttcatcctgggtgtgttctgcttttttgttgcttggattttactgcagcagagagaggctaactcaacccaagcactggttcatcttagcagtagcagtaaagggtataaaccagtcaatggagtactgggtgaatgtccctgcccccttgaccttcactgagacaattatgaggcttgttccccatggctcttaagaatgatggagccctcattgcccacaccagcactcaccttagacacacccttgactggcttttctcccttctctttctcattttctgcagtcctgcttggatcaccacccccagaaatatttcttccatccaggttattttggaggtctgtatttgaatgggaaaacagtacttttgtaattttctcatccatgtggccaaatactggactgatggggaatgtacttctttgtatgtttatcttattgattattgaataaaatactgtttggccaatgagacagtaagttagacaggactaggagtcaaagaggattctgggaaatgtagtagagaagtggtgatccaggcaggaagtgacatagcaaggagactcatatttaagcaaaggaaacaggaagtgtccccctttcccctctgctcctcctccagcagcgcaatgtgatccaccggcaagggagggtgccagcggaaggcatcctctataagataagtcttataaaatatatagatttatgataattgagactgagctaacagatgagaatcctagtcattggctaagcagcatttgaacctaatacaagtctctgtgcattaatttgggccctaactcgggcaggcagctggcgtaaagcgcacacgtggcggtggggctgggagcttttggcggaaagatttatcgtaacactggacaagaagcaacctaaaggttataaagaggtgacatccagaacccaggaaaagggacccatctcagatcactagatggtcctctcttcaaatcagaaagaacaagcagagatgtggaaaggtttgcaggtgtcaagaaagtaaagggctacccttggctttaatggacaacaaaacaccctgagacctggagcaggcagccatacaagcggaactgaactgctcagctccttcctgtgcagagcaagattctcacacatgctctccaaaggtgaaaaccaagttgatataatgcctgaaaagcacttagcatagagcttggtccatggtgaggtctccatgaatgtgagctgtggtggttactaacgctggcattatgaagaccagaggcccctcattatcaacaaccatctgtggttattgaaaaggagatgccagaatctaagataaggaaggtaagccaaaggcacccatcagccagcttaaggagcactgaccctgggacgcacggctcagctccatgtttcccatgccagcagcagcctgtccaccagactgacctttaagcatacagccatgtcatgcctaaggctgttctcccagctacacctctgaacaactaagtccttgtctcatcggtatcacatatcccagaatcccaaagtggctcccttgacttatctatgtcctctgatcctcttatgttaattgctcttattaataaagtacagactttgtcccagtgccttagaatcacacagagagatggttaaaatgctggccacttcgtacccactgaatcaggatgaaggtgtggaggatggattttaggaaccccctgctcaccattcgaggccgccaagtgagtgtgctggacactgggaagaaagctgcagccctgctcttcagctctacagggaggaagctccccagccaagtgatgccctttgtctccagtcacaaaaggtttgtttcccctgagcaaagccatgaaatgacaatgtctgttttcttctttggctgggctctagggagcctatgagaggggctctaccagctctaacctcttctcctgggctttgcatagaccagcctcacagactgcttcatggctgtgggtaccagtcctgagaactctgcttttatctcttcacacatggggggttcagaggcagggctttctggaaagtaagttgcttcaaagaacataaaaaaaaaaaaaaaatctactgagctcgcccaaactctcattttacaaattaaatccaaatataaaatccacaggtccgggatgtagaacaacttcaaatccacaaaacttaaggcaaagttgggaccaaaatcaggttttttagtattatttgctttgttttttcttttttaaaatttgttttgttagcatataaagtaatggctttcatcacagcatcttacttcatatgggccattatactttgttgccaagtgtttctccttcccccactgccttctcccgctggtttctcccccaaagagtgtcgcacatcattttccagctgtgaatggccattactctatttcccagctcacttaaaataatccccagcacacacccttttcagttgtctgtgtgtgcgtacacacacacacagacacacacacacagagttttaaatttaggttatgcatatgagagaaaacataacgtgtttttatctgagtctggcttatttggctcaacaattcccaacttcagtccatatctttgcaaatgtcctgacttcatctttgttgtataaaatccaattgtatatatgcaccaccttctctttatgcatccatctgttgacgagcagctaagctagctccacttcctggctggccatcgtgaatagtgtgccaacacacaggtatgtgcaagtatttctgtgattggtagactccagttcctttgagtatacacccaagaatgctagtacggtggttctcgttttttttagttttttgaggaatctacacactgatttccatggtgactgcaacagtttatacccttgtcagtagggaaaaatgttcctcttctctcgcatcctcaccagcatctgtcgccatttgcttttgatgatcgccattccgacttgggtgagatggaatgacttccggtatcctgttggtgggatcttacttgattacgtggtttcgcagtataagagggccaaatctggagatgtcctggaacatagaaagtacttagtaactgtcattactatattggtgtcttactaattactggatgtagtcgtttgttactattgattcgcatttgagaccagaagtgcacacagcaagcatcaggaaaccaagaggagcggggagagccggctggccacccagacagctttgcgcatgctgaagttctttctttgttaactcactactgctcaggctccaagtctttgcagtaaacgctgtcacgatcccagaattgatcagaatctgtgatcattcttcattttatcagaactgtcatcgactgacatgaaaccagctattcatcctgcaaatatttattaagcttcatctaaaagcaagacaccatcccgggtgtaggatgtaggggtgaagaggaaaacatgggcctctcgatatcattggagtagaggttagagaaagaagagcaatggtcagtaaatatctatcacaccgtaatgaagcactgtgaggaaaaaaccaagcaaaattaaagagtagagacaagagacaatgccctttgaacaatacagagaaaccctgtctcgaaaaaccaaaaaaaaaaaaaaaaaagaaagaaagaaaagaaaagagagaaagaaagaaagaaagaaagaaagaaagaaagaaagaaagaaaggaaatgccctgtggttacggtgctcaggtcagatataccaactgcagcagccccaccctgacatttctccctatatagtcaatgtgaggagttataacagaaggctgcctgggagcttggtgctaaagcatgattctcagcctgtggggcatgacccctttggggggccacatatgagatatttacattatgattcatagcagtagaaaaattacagttatgaagtagcaagaaaaataattttatgtttggggggtcacaatatgaggtattaaagggttgcagcattaggaaggctgaggaccactgggctggaggagaggatgctagctaagattcaacagcccagcaacagtctatcctgctcatctctgtaatgtggctccttctgccctccgtggaccttgagcaccttgtctaccctggaatatcttggtatggccaggaagtgtccttctgtggtgctcatgctacagtgtgttcacagtccctgatcctaatttatccatatgtataaatcttcattgattattcacttatttgcagatcatttctatgtctcatcttggatgacctcagtctggatgtcatactttggtctgagaaggcaaccctcttccttccctgcagcctgcagtcctcctgttaccacatacaaaatgctctgtcttccctgccaagttccccaaaggactagtcacttacaacggcttcccaatgctccaggacactttgttctctgggctacatctttcttctgagagaggctgtgaggcagcctggtcttggcttattgaggtgacttggagtctagaccaaatattgtgcgattttgagacaggatctcagagaacctggaattcagaggtttcccttgtttctctcaatcaatggaaacatttaagaagtagggaaagggattccccactccacaaaaaaacaaaacacacacacagatgcaaaaaaataaataaataaaaaataaaaactctactagaagaggaaattaagggacaaaaggaaaaatggaagacttagggcattcagtaagcagggaaagaaggagtgggaaggagagctttcttaagcctggtgatccctgcagtccttgtgaataactgtactgtggggggggcaggggggggttgcagagcaagcacctggtcccaaccacttcatctttctttctttgtttttttttgttgttgttgttttattgctgttgggtttgttttttgtttgtttgtttgttttgttttgtttttcgaggcagggtttctctgtgtagacctagctgtcctggaactggctcttatagaccaggctggccttgaactcacagagatccgcctgcctctgcctcttgagttctgggactaaaggaatgtgccaccaccaatgcccagctcatttcagttttcaaaagatcacatgcttgtaggcaaaacacccatacacataaaaaaaataactaaaaataatttaaaaataaacaaaaccgacaaaaggtatgaaggctcctttcaatggaaatattacaagaaccccaatacagtgaaaattggactgctctagcccatttcagcagtttaactaaacccctgtggataccctctgctcaggagcaggtgggtgggactcccagacttctacggagaatgatgggttgccttttatgaagccctccccaactccactgaaaatcctttaaaactgtgtttatcaccctcgttatgacttagccccacaaaaatgttatacgccctcacagtaatggatgcctgctttggttgagaggctccttagtgttagaggaagggagaacagctcccactgtgaatcattaacctgtgagagctggacagtaagaatgatgcaacctaagccgtatcaaagaggactgtgcagacttgcccagtcagatgttttgctacaaaactcacagtgtatatgaaagggtgtgattaaagtgggactattctttggagttataaaaaagatatgaccaagatgctgtttgttaccgttaagtgtcctcctgagaggaaaaaaaaaaaaaatgcctcccactggaaggaaggaacggcgtttctctgggcattcctgtgctcttgatgtagtttgccactctttctcagtcactgctaggaagccagaccacctcaggcagagagagagagcactaatggatgcagcttagaccctgacttcattccttaactgcaactgatttgcctactctttcttcgagcctcacattcctaaccagctggtacttcagcttttcacattacgtggactttgaacggcgtgtgagtttttaaccaagtgtacagttagagggaatgaagtccacaaaatgattgccctcaatctgacaccagttgccaagtctgaggaattttcaaatctgcccactgttgcagtaatttgctagaaggactcactgaacgtacttgaaatggttatagtcctagctgtcatttagtatagggaaagggtatacagattaaaattatcccagagaagcagcacctaggagttcagagaaatattaagcatgcatgatgtctcacgtgggttaggacactgtttcctcatgcattataaacccaagccttggaatttttattggagctagatcacacgctgccacccacatggctaaccttgatctcctagcccgtccaaaggttaggctgataccttttatctctagttctctggagaaagcatcatacttggctcttagcctccatggtaaattgcattgttggattgtctggtgaccaacacctctaggcaaatagccattcttatcatacctggcatggaaggctctaaaattaaatcccaatagctcagggtaaaagctagaacaatctttagggaagattaatttcttagtctatcatatacaaaattcatcttcaggataagataaagaaaaagatggagcaaataactgatcaaatcaaattagcagaggtatggccagactattgatcttcattagtaatgagatcaagtcccctgaaggaaatcaatggtaaggaactccagaagggactctatgaccaaagccaatgaccacctcgtgaacttattttactgcttgtggtaccctaatgtggagacgagagccaggacgcccatcacttaagtgaggtgagaaggcctatccctcagtgatctctggaaccaaagaaagcatgaaggttcagcctgtcttgggcttattttattgcctcatttatttggattaggatagacttgtgtgtagcaaaaggtgggactcctggcagatgctcagagccatttgagaaagatagttacttgagggtgtagatgacccttggactctagagtgtgagagccactctgaagaaaactttagtagcacctgagtgaaacaaacagctgctgtccttcctctgacactctgagagtcttgtgggtcccaacacacacacacacacacacacacacacacacacacacacacacacaccacatacctacctgattgagaggctgtgaactctctatgtagcatggcatataatctcacgtcagtggctcatccaatcaggagaaacaaaaaatgctgtcagctctggaagacatctacaacctcagagagtgatgggcatttgcaggtctcctgagctcaactgcacacaagactcctgcacctctgtgtctccctgttcatatgttgtgtgcctgtctctctcacccagcctggcagatgccaatgtcacaggtcaagatacacagggcttagcactggcgagatctttagggggaaaaaaatcacaactcctgtggctccatggaactgtgcttcctctccttttacctatctgcccactccaagctctccactcccatcaggctatgaggttggaaggcaaatggcaatcccaggcccaaagctgaggttctacatggaaaaaaagatacaccacctaggagagcctctttctggtgacaatgaactcacctcccagaaggagctactggtacccccactctgacgtcactgggaagaaagaggaagccaactgtgctagggtgaagcaggcagttcccccaagatcacccaataaagggagaacatggctgtttcttacaacaggttgagagttcccttgtcacagagtgagcagaagtcaagactcaggcactgaatggcaggcaagatgagaaggccagccttaccttttgggctgcaggcttcctcctccatgaaaaaccctgctccaccctaaaggactcctaacccctgatgcctagatctctggggagtgcctcccctccctttcccacttatcctatagtcccctatagacaagggctctgtttatgaactcagccgtcctcaggggttacctcacatcagtaaagtccatagtgcccctccttgactcctgggatgcggaattctgggtgatgatcacgttttgcaaggcatgtccatcttgtaggtggaaaagagtagccatgaagctgatctctagcttcatctgatgcctcagagtcagacggttgccctgttgaggctctggagatctaatggggctcagcacagggttctggaagagctctgaggagacacaatcccagggttcagaaaaggagtgctggaaagcaaagcccacgaggctgagaactgagcctcaacatagctcacagactacagtgatgaaacccagacaagaggcaagttcatatccagagcctgtcttgtccttatccggggaactctaaaacaacttctccatagacaaatccttctggcatccctgagtcacagccagaaagccttagtggtcatccggtcctcaaagaggaagggtaaatggttgagcttgtccaagaatgcacctaatctcctgctgctcctagctccagacacaccccaagggggtgaaggaacaatggatatagtcgtggttagggtttctattgctgtgaagagacacaaactcttatataggaaaacatttacgtgaggtggcttaaagtttcagaggtttagtccattatcatcacggagggaaatggcagcatgcaggcggacacggtgctaaagaaggagatgagagttcttacatcttgactcacagacaacaggaagtggtctgtctcactgggaatggcttgagcatatatgagaactcaaagcctgcctccacagtgacacacttcctttgataagtccacacctactccaataaggccacacctctcattagaaccactcccgtagaggccattttctttcaaaccacagcagacatcattggagaaacctccatacctggtgcactggcccaacaccagctggagagaggggtcctgcacagagagttactgatcactagaggctggatccctgagcaacctgcatctccctggagggttaggacccccaacggtcactctcctgtcacaccagtacccaccagctagtaagcaattccccatggacttgattcaccatgactgatgctaaggtttgtatagagtacatcacctgcccactgcagctgtacgggccactgttttcgattgctgctatttctatgaacaggatcgatgcattagagaaattaaggtgttatccatctttgtagaacttcacttgagacactgtgtacttcatccctgacattttagagacagcgtgtctccttccagtgtggagtctggcagaacttagagatgagaccccagctgtgagacatggggacaggacctaccatggagccacagatcccttggtttactgttctctgtactctaaggctaaggctcctggacagtgtctttgtagctatgtgggtctctagtccttcatgctggaccacggtggaacaagaactctgcttcctttctcccctttccttttccttctcctcttcttcctattcttctcttaccgtctgtgtttcttttcccaatgaccttactataccctggaagtttctcctcatcagcaagtttgcttctaataggttaattccaactaggtagttgccttactcctcctgaagacattcccatttgcccaaaatttatacctgtcctcatttcaagggacagacacaatatccccactttcagggttagactcaggtctagactctaagaaccccaagataaggaagcttgacatggcttctcaacccccaggtcctcctcagaggctttcccaggttcaaacacctccgatggcacatgctagtacatattcccaccaggaccctcaccctccatccagacatgcagctgccttgttggttctcatcccaaacaatatctacaggaagaggtctccctccttctgggctttgaatctctcacaaatcaaacccacacacccaaggtatccttaagaaccaataccacagctggtattcaggcctgaagaccacgatgaagaaatgtagaaataagatgcacagagggattactaggccatccctgttatgatgaagataaatatgtgtgtcctcagcctcctctctggaccacagggtaccttgcatcactcctaagatactcgggcctgtaacgttctgagcatactcctcatttcccaagcctggtctctcaatcaggactaatcacagagctcttgggtttccaagtatctgcactctctcctacaagcagtgacattcataactcactggaagtctgagtgtgtctgtcatggtgtctcctttctgactgattcactggaaagcagagaaacaaggtttatttattattaattcattgacttattcatccatcaaacatttattaaatacattctacaggccatacactgaggaaatgtgctgcttcaagtctgatagacaagaaaaagagacaaagtattaaatgtgtaaatatataaagtaattgttccattctacctggagaggagattcagataggaaaggtcatcttgaccttaccttgatacctaggcaagcgttcagtatgacggggaaatcaggaagttccacttcaagatggaggcacatgggctggagagatggctcagaggttaagagcactgactgctcttccagaggccctgagttcaattcccagcaaccacatggtggctcacaaccatctgtaatgagatctggtgccctcttcaggtgtgcaagcatgcatgcagataattgtatacataataaataaataaaatcttttaaaaaaagatggaggctcataaggaagccaggagaattcttagactctgggaaatgtggccaggctggagagtcaggccatggggaggatggcgctggggaagtgagtctggagaggtagcggccagtgaagttcacactgtgccagaacgatggggaaaattaaggatttggaataatacaattagatttatacttgagagcctgtaacttcagtatgaagagggatcacaagaggtgaataaaaaagacagcgaggctactgcaattgcctaggcaggagaggagggcaccagctgagagactggcaaagaggtggaaacaagagactgggtttgagtgatgctaaggaggcagggacccagcacctgaagacggagggagaggacaggaaactgaggaagagctgattgtgtgggagaagtgatccattaaatcagggaaggcactttcggcattactcatggggatgcccatcaatttagagtctgtaaattaaatgtctgctctgggctggaagatggattccagaatcattaatatttggtggtgtatgatgacattgtgtggggaaagggttttggtatgtaagcatggaggggagagtgggaatatgtgtttaagttatatttactcctttgttcttatatgtaaatatgtacatgccaggtttctattgctatgataaatatcaaaagcaacttggcaaggaaagggattattttattttatagctcatagtccatcatccagggaaataaaagcaggaacacaaggcaggaacctggaggcaggaactaaagcagaggccaagaagcagtgctgctcactgccttgctccccatgagttgctcagcctgctttcttatagaatccaggaccagagtctcatgagtggccccacccacaatgggctgggccctccctcatcaatcactaagtaagaaaatgccctgcaggctcgtctacaggtcaatctggttgaaggcattttctcagtagaggttctctttttccagataattctagcatgtgacaagttgacaaaaactagtcggggatgtgtataatataatgtgtgtagtttataatggcagaaagatgaaaaacaacaaaaatgtttactataaagggttaattaaattatcataaaattgtataataaaatatgacggagccacaaaaaaagagataaatctttaatgcatacatagaatgagttttaagataagtgattattgttgggggagtaaaatcagcatgtgaatttatgtatataatgctcctgtacttgtcaattataaaaaagcatatatacatgttcacagatgtcataacatcaggacagatgttatgaaatatgtttttgtgcaggtctacaccaaatctgagcttacagaatggagccagtctccctgactcatgtaaagtcagggcctgcagcaaccttttgccagaccattctctctgacactcacagaccgtgtgggtggttgggatgggacataaaaaacaggaacaaaacacagggacatgcagaaacatgaaattaaaggctcgccgaacttggagaaaagtgggggggattagattaagtaataggggcttcctggcaggaggaatagttacggactgtaatggtgtacacaggagatctgtgggctccctccctcatattctctgtgcagatgtgagagtgcctgttcccatggttcctctgccctgcccagtctcagttcctaatatgttctccaggagtatctgcacagcctctgaccacgccagctataggagctccaccccaaatgcctgtgtcatttccctccactgctgctcagaggaacaatgagcagaagctagatggtacctaagcaacaattacgacatcctctaagaaggaagcaggggtggacatggagctaggggggaaacttcataataaaaaacggaatttttttgtgctaattattggtggaaacagatttgcagataggacataagatctgatatggtgggtctcaggcagttgggaagaaatccttctctctcaggggtggggtgggtgggtgctgctctatcttgaaggaagcagatgaataggatgggatgacttccagacaggccagcaactgaggcagtgcagataacgacacatagcccacatcttttgagacagattcctggttcctacccacctctccgtttgcttttccctcatctattatgaacacgtctaaagttttcagcttctctcgactatatgttaaagggatagaagcaaaggggcttcacagtccctctctgtatacattagcaaggtgataaagattcctaggaaagggtaacctcaaaagcagagagaacctcaggtctgtgtctccagctaccccactccaccaggagcgccttgtttgtgtctgtggtagtttgaacgttccccagagtgatccccagttgatgatgctatttgggagagttaggaggtgtggctttgttgaaagaagtatgtcaccgggcatgggctctgttttgtccttgtggttcaagatgtgagccctcagtgttctgctcctgccaccatgcctactgcttgttggcagtatccctgccatgacgggttcctctccagccgggaccataagcccaaataaactctttttctgtaagttgctttggttactgggttttgttacagcaatagagaggtaactaatacaagatctaactgcagatcttgtggattttgttactagtgaaaagaggacagtgctggggctaggtaaatggctcagttggtaaagcatttgccttgaacgtatgatgaactgagtttggactcccagcaacaatataaaatgccaggcattatagctgtaatcctagcactgggaagcaaagacaatgggatccctgaagctcactggccagctaatcttgctgaattagtgaataccaggttcagtgagagactgtctcaaaaaaaggtggattgcaacagatgaggatacacccacagtctacctctgacctaaacacatacacacacacagaggtgatgctgttagccctgcttatcttcagattctgtaactgcagatccaactaaccttcatcagaaatatttctcccaggtcgggcatggtggaccacaccctcaggaggcagaggcaggcaggcaggcaggcaggcagattgctatgagttcaaagccagcctggtttacatagagagttctaaaacagccaggattacatagtaagatcctgtgctaattagttttatgtcatcttgacacaggctagagtcatttgggatgcaagaacctcaaatgagaaaagcccccaaccagactgatctgtagacaagcctgcaaagcattttcttaattagcagttgatgtgggagggcccagcccattgtggagtgtgccacacctgggcccctgctcctggatgtcataagaaaacaggctgagggagccacagggagcaaaacagtaagcagcactcctccgtggtctcttcttcagttcctgcctccaggatcctgccctgttttgagttccagccctgtcttccctcagtgtagaactggtgtggaagtataaactaaatacaaacttccctccccgagttgcttttggttgtggtgttttatcacagcaacagaaaccctaagacagaccctgcccccccccaaaaaaaaaatcccagcaaaacatttaaaagcttttttgtttgtttgtttgttgacagaatagagaatgcataaagttgtattttggtttggtttggtttttttatgtttttttgagaaagagattctctgtgtaacagtcctagctgccatgaaatttactttgtagacaggctggcctcaaattcactgagatccacctgcctctgcatcccaggtgctgggattaaaagcatgagccaccaccagctggcacaaaattgttcttgtcatttcctgaacacagtataacaactgtgtccatagcataggttagtataagtaatctagagactacttaaagtgtataggggggtgtgcatgagttatatgcaaataccttatataaggaacttgagcatcagagacataaacatacatttctcaggcaatggtggtgcactcctttagtcccagcccttgggaggcagaggcaggtggatttctgtgagttcgaggccagcctggtctacagagttagtttcaggacagccaagactgttacacagagaaaccctgtcttaaaaaacaaaataataataataataataataataataataataataatacatgtacagttcttccttgcagcatcataggctaagcagttactttctcttcttgaagaagggtttatatccagtccctatcatcttccccaccccagaactgacctcagaaacattaatctgactgcatgaaaacacaggttttcttttttgtttggaggattagggaaacctctgcttagttttcatgagccatgacattagtcctatgtgtaactaaatgagcctcgttatgctgtcagtctggttgcatttttatttctgttttgccatgttcacccttccaacttggtgattcatctactttgcaaaattattgtgagcagagggaaattataacactgggtacagacctggaggcgctgagcactgagttcaagcacaaggctctggttcactctccaaccctgggacagagaaacaaagtccctctccaccatatttttccaagagccacccttcccctcacactaagtttctctgattttttttcttggttgtcactaccttccccctccccagttcctcttataacatgcaaatgcttctaggactatcagaagaaaaccacgccatatctctgtttagaaactgctctagaggtttataaatggtctgtagaaaaatgcaaatcttttcagataaacaggctcagctgaaactatgagctcatttttgtaaaagtgcaagcttaagcactgggagggaagtactttgaatcactctgaacttcaaaaggcagaagttaagagtcaaagcctagtaggcggaaaggggtttttgattttgtcttattttgtttttactgaaagaaaccttttggaaccctataccataagtgacctagagaaaacagcacaaaaataatttctgttcattctactcaacaatgagttctgtgatgctgcataagattgcacgaaacagctgcaagccatgaaagaaaaaacagatgcggagacccagagcaaagtcccagcatccaagccacgtacgtgtcccaccccgctggaagtttctagaatggctcaaaaaagattagagggctggtgtaagtgacgtaagttatacttgaagggactggcatggacaagacatagggttggggatcatgtggtctagcgggagggagcagaggagaagataagagtgggagacaagattgtcttggtccctggaacccggatgaagcaggggaagtttaggcacaggcagcaacctaaaactagtctggagtggatggactggagagacattcatagtattattctcagtgcctgccaaatccatgggcctcttccaaagaaacccgttttgtgctgacacttgcaaaattggccagaccctgagttttatgatcaggccaccctggatatcactgatgagaccaaaggtccagggcctggctaacccagtgggttcagaggagagctctgtcttgtacagagccaagttgtcttagagaactttgaacaccagctaggaagtcagaaggcagtgaaagtggagggcaaagctgaggaaggagacaaactatatataactaaagccccatctgcagggacagcaggctgcctacacagccagagtggatgctatttcccgatggtcatggagtggtccccactcatccatgaggccagactaggacactgttaatatagaagaatccttccttgtaagtgattgcttgaggtctccaaagcctgggcctacgtctctttaaaaagaactgaactaaaacaataagctgcccttctgtgctgtctccctgccacaccagccaggctgcccttcagccatcgtgtttaaagattgtcatgaaaatgatactgatgtctccatctacccacaacccactatcgggagctaatcaacacaacagatcttcgtctaccaatatcggaaggattggtctcaaagggaacaagtcacaaatctgtccattcaacatgaaaacatttatgcttaagaacaaatctacctagtttgcatatgcgtataaaataaaatatacacacagatgataaggaagcagaggagagggctggggtatagctcagggtagctcggagtacttgctgtatgcatgaagccctgagtttgactctgagccatggataagctgagtgttgtggtgcacacctgtgataccagcccttgggaggcagaggcagaaggatcacaacaaagccatcctggggtacatatacatagtgacaacctgtctaagaaaaacactaagcatttcatataatgtaatgaaggagaaagttgaaagtcataagcttgaaataaagtttcttacaaattagtcctggaactgttaagtaggggcatggaatatgatcaatacttgaccagccggaaggagaaaagagtaaatttgatccctctaaaccaggtatgttgagaactgactcctcaaagttatcctctgatgttcacatatatgcaatggcgtgcgcgcgcgcacacacacacacacaaacacacacacacacacacacacacacacggacatacaatcatcatcatcaaacaaaacaaaacccagaatctggactgcaggaaagtcctgggtaataagttacaatggaaagacccggatagaatgacactagtctcagcacaaatgagagggatcacatgggctggcctgtacacccctccaagtctatatgctgctatcctgaccctcgggatctcaaaaagtaactgcatttatgtacagggcctgcaaaaaagtaattaactggacataaggtcattaaataggacacagtccattctgatgcttgtccttttaagtagccacgcagagagacccagggatatgcgtgcaaagaccaggcaagcttgcatggagaagatggccatctgcaagccaaggagataaaactcagacgccaatcctgctgacccctcaactctcaaacttccggcctccagaactatgaggacagaagtctgttattcaaggcccagtctgagctatttgatatggagtcctgaactgtttgtgcatctactgagcctgtggtaccccccaaaaaattaatggaaggggccatcctgacccaactgaaaaagggaaggggcagcaataacatgaacaagttaaacagctgaagcccttaggagaggctagcagaaaacagcttcagtatgtgtctcaacagggcgccccagtaggagggctgcagatgaaggaaaccccctattcatcagtactgccatagctcacactgggctgctttggccctcagctgtaactggccctctcaggtctcctgatggagactctgatgtgaagagctcacttgagtgacagcctccagccactggacatttggatatgtctgatgctaacccggagtctacaatgcccccagctgtttctagccaataactgagcagagctaggcactagagaaagacaattttctgtctgacaaggaacttcgctaggacacagttcctgttctgggatgcccccaccctgagccagctcaggcttcctcagtcctgctcttcccatcaggactgagggaagagtcctccttccctacgcaactctctataggtgccttgtctccactgataaccaaagcctctctgcctgtgccagcctctaggcttcacagggagcagtgtttcccctagagaaatgctctgcatgctagttttattttactctccatttcgtttgactgacctggctgccccccactgcctccttaagcccttctccacaccacttagagtcctgctaaaattcaaatctgaccttgctgcacgctgctttcaagatatctggacatttgcaagataaaattgaaagatgtaagtctgtctggatttggcctgtgttcaacggtctgctctcctatctcccatccctaacccattctgccagccatatggaatgctgtgcattcttctactctggagtgctattttacatcaaggcttttggctgaaaattccttcacggaacatcctnnnnnnnnnnnnnnnnnnnnnnnnnnnnnnnnnnnnnnnnnnnnnnnnnnnnnnnnnnnnnnnnnnnnnnnnnnnnnnnnnnnnnnnnnnnnnnnnnnnnnnnnnnnnnnnnnnnnnnnnnnnnnnnnnnnnnnnnnnnnnnnnnnnnnnnnnnnnnnnnnnnnnnnnnnnnnnnnnnnnnnnnnnnnnnnnnnnnnnnnnnnnnnnnnnnnnnnnnnnnnnnnnnnnnnnnnnnnnnnnnnnnnnnnnnnnnnnnnnnnnnnnnnnnnnnnnnnnnnnnnnnnnnnnnnnnnnnnnnnnnnnnnnnnnnnnnnnnnnnnnnnnnnnnnnnnnnnnnnnnnnnnnnnnnnnnnnnnnnnnnnnnnnnnnnnnnnnnnnnnnnnnnnnnnnnnnnnnnnnnnnnnnnnnnnnnnnnnnnnnnnnnnnnnnnnnnnnnnnnnnnnnnnnnnnnnnnnnnnnnnnnnnnnnnnnnnnnnnnnnnnnnnnnnnnnnnnnnnnnnnnnnnnnnnnnnnnnnnnnnnnnnnnnnnnnnnnnnnnnnnnnnnnnnnnnnnnnnnnnnnnnnnnnnnnnnnnnnnnnnnnnnnnnnnnnnnnnnnnnnnnnnnnnnnnnnnnnnnnnnnnnnnnnnnnnnnnnnnnnnnnnnnnnnnnnnnnnnnnnnnnnnnnnnnnnnnnnnnnnnnnnnnnnnnnnnnnnnnnnnnnnnnnnnnnnnnnnnnnnnnnnnnnnnnnnnnnnnnnnnnnnnnnnnnnnnnnnnnnnnnnnnnnnnnnnnnnnnnnnnnnnnnnnnnnnnnnnnnnnnnnnnnnnnnnnnnnnnnnnnnnnnnnnnnnnnnnnnnnnnnnnnnnnnnnnnnnnnnnnnnnnnnnnnnnnnnnnnnnnnnnnnnnnnnnnnnnnnnnnnnnnnnnnnnnnnnnnnnnnnnnnnnnnnnnnnnnnnnnnnnnnnnnnnnnnnnnnnnnnnnnnnnnnnnnnnnnnnnnnnnnnnnnnnnnnnnnnnnnnnnnnnnnnnnnnnnnnnnnnnnnnnnnnnnnnnnnnnnnnnnnnnnnnnnnnnnnnnnnnnnnnnnnnnnnnnnnnnnnnnnnnnnnnnnnnnnnnnnnnnnnnnnnnnnnnnnnnnnnnnnnnnnnnnnnnnnnnnnnnnnnnnnnnnnnnnnnnnacacacctacagatctttggattctcactaagacctacttcaaatgtctcctccattaaaggttaccaagagcaaatggccttcgaatctgagcacaccacagtctcctaacacaggctgggactaggggcctgaacaacattttcccctcacagttccgggggctggaaggctgagatgaaggtgttttaggtggttccttttgagtccttgcttcttggcttgtaatcttcttcccaggagatcacctggtttttcctctgtccccatgtatcccatctcctaatttcctcttcttacgaagatattagatcaagaccaactctaatgacctatcttaagtgcccttaagagaccctatatacaaatgtattcacatcctgaggtccaggcagacactcccacccaaagaacacacccacccaaacaaagctatatccctgtggtactacttttgtactcaacactgacacctaagacattcatgaaacttcccagcagttccttttctcttagggaaacctttagcgtagaaataaaatcatttctatatccttaatttagtacagtacatgtacgcagtagatgttcaaactctgtgggagagtaagtgtacctacaagtattcttttgttcacatacatgcatttgtaaaaagtaacgttaacgttcctagcttatattacaataccttgcttagccgttggtgccctgccaatcccctcttgtagcacttaccccacacccagcctctttttccctggtcccatcaataatgtgtgattcttcatccctctggtggagaaagaaacatggggcttgtggctgtgaggaagcctggccctgagcttcacaatctacatgtcccggtggcctgaagggaaccaagagagctcccctttcctaaagaagggatcctaaaggatggaaagaggatgctgacaggcaagacattgggtctcctaaagaaaggctctctgtccactattttgttgttaagttaatccaagtttatttttattattaacaatcagaagactttaatgagagacatgaggtggtggtgcacgcctttaatgccagcacttgggaggcaaaggcaggtggatctctgtgagttccagcccagcccggtctacaaagtgagttccaagacaggctccaaagctacagagaaaccctgtctcaaaaacaaacaaacaaacaaacaaaaaacaaaaacaaaaacaaacaaacagtaaaaaaccctttaatgaactaacttgaaagataagtattaggaatgaactgacttgattgagaaagcaagcttggactgaaggtcagtgttggccaggacactgtagaacatagttgacatggaaagcagggcaaggatggagtgttgagtccagatacctcttacgtccttctacaaggacatagatacctcttctggtcaatggctctggccattaacctccatcttcttacccaaaattaaaagcagagaataagacaaaaacacttcttgagaatctctaggtctgaaggcaaagggtggcatttggtacctggaacaaacacaataagagacctaggacagaaggatgagtgggacaaagagaagactgtgcccttgcaacaaccagaagtgcttcactcaggctgggataaaggaaagtgtttcccagaggagcaaggtgagttgagttccccaaatttggatgaggaagcacaaaaactgcaggctcagctcacagctttccttctataactgtgaaaaagtcacttctacagaagttgagtaatggtccccaaagacgtccacatcctaactcccaaaacattaaagggtaaggaagacgttgcatatgtaactaaaccaaagatcttgaaacagagacattattgtgattattatgaatacgatgccaatgtgatcataagagcgctagaagagggaaacaaatgacaaccaggtgaggctagggcaggaggaagcacccacggatgaaggatgcttctcaaacctgggggaaaggaatgaaagaccataaaatacagtcacattctttagtagatagcatctgccttcagtgttcctgcggaaattaagttactgggtatattcaacaaatatccactattggtaaagatggcagaagagaactgactccataaagctgtcctctgacttccacacacatgctgtggtgtgcatggcccccctccacgtcatacaacatgcacacacatgaacaaatgaatgaataaatacagtgaaaaaaataaatgttcactactatagttatccccacccccacccccacctccttaaattctggacattgcactcagggcatcgtacgtgctagacaaacactctactaatgagctacatccccagacctattcttggatctcttaaagttgattctccaatgtgatgactacaagtcataggtaattatttaaatacttgaaatgtggggttttttctgaattaaagtatgttgtaaatataaaataaacacaaagtttaaagtgcttaatataatggctgatctcagcaacttggcacagttctgtctgtgtctatgagggtgtttccagagaagattgaccttagggtcagaaatagaagagactactgagaggggctggatggaacaaaacagagaaaggaagagtctttctcttttctcatcactgatgaaatgtgggcaaaaagcaacttaaaagaggaagggtttcctttggctcatggtttaaaagggtacagtccatcatggcaggggaagatatgatggcagaaccagctcctgttagtggtggtggtaaaaatctgagggtatttgttcacatctctgcagatcaggaaaaagagaagtcaactggaagtggggcccagctgcacctctgaaggcccatctatctctaagccatttgcttcctccagctcctagaagttccacaaactcacaaaacaggaccaacagctgggaaccaagtactcaaacatgtgaccctttagggtgcatttcccagtgaaaccataacaactgcatgcccactgcattagctgttcttctcactgctgtagcatataactgacaaaaacaaccgaatgaaggatttctgttgacttgcagtttgaggggacacagtctatcccagaggagaaagtgtagcagcagaatactgaagccgatagtcacattgaagtagagagctgacccctttttatgcagccatgcactggtgccatccaccatttgggtgggtcatcccatctcaatgaaccaaatgtagaaaattcttcatggacattcccaaaggtttgtattcatggtaattctaaaccctgtcaagttaacaaggccaacaatcatactctaaaatgctcaactcttgttgagcagtggacttttcccacttgcactgcctgtgaagtgttgactcaggctcctcagctactgaacataagcttgcatcagtaactcaccagaaggttcccaggccttccgcctcagactggagctgttgcattggtccttttgttctgaggattctcgggttgagcagctgttagtttgtccatctctcccacctacagatgggcttttgggaccatttagcctctggccaggagagctgactagagatttgaagagccataaaacaggaagttttctcttttttattttatttttatttatttatttggttttgcgagacagggtttctctgtggcttttggaggctgtcctggaactagctcttgtagaccaagctggtcttgaactcagagacccgcctgcctctgtctcccaagagctaagactaaaggcatgcgccaccaccgcctggtgaaacaggaagttttctatgagactcatctcaaagaacttcagagaagcaacacccatgaaatctcaacaacatgactgcttaagcaaggacactgattgatagatgtaataagatgaaaagggaaatctcatagggcttcaaccccagacaaagaagtacagacagctaaggaggggagatatcccccctggggagagctccctctgggttatccaatataattggtcattatacattacaaggactgcaaaggttggatttatatgtttaggaatatatgttaggagtatattcttttattgttgatatatatatatatatatatatatatatgtaacaacaattacagaaatggaggctatgaatctgggaaagggcaaagcagtgcacgggaaggactgggggaaggaaagagaagggggaagttatgtaataatatttttaaaaattaaaggtaatttataagtgtcctcataatttcatacataccctattgattctgttgttctagggaaccccaactagtgcgcctagcaaacactggagacgttatgtgaaacagctctatagttttcatatttattatatgctgaaatgatatttgggccgagcagattaaacagaatatattgttaatttcatccatttccttttaccattaataacatgctcctagaatgtttaatttcttcctttcttttttgagacaggttctcatgtatccctggatgatcccaaacttgtagcaaaggatggccttgaacttctgatctcctgactctactcggagttctggaattacaggtgtgtaccgccacaccctgtttatggggtgcaccgattgaacccgggttttgtgcaagtcacaccagccgtttgccacttaagctcagctccagcttaaactctgtacctttacaggacctataaacaaagccaagttgtgaccaaacaggttcccagtttgaaaaaatcacattccttgctgcccatctccactggggaaaccctccaggcctcgctcagctcctctgggtcatgttccttcaccgttgccttcattcagatggtttccttggctctccttggagcctggcagccacctgagaaatgcattctccttgggtctgcaggccttgtcacaagaagtttcaatcaagggtgtcagcaagcatgatcagctacatgcttgacaccagagactttgttagtaaacaagctgattttgcagttgttttaggacagggttgctctgtgtagcctagctgtcctggaactcactctgtaagccaggctggccttgaactcacagagatccatctgcctctgcctccctggtactgggattaaaggcgtgcaccctcatgcctggctttataaactgatattttgactacccgtgtctaactacagatattctcacttggtagttcagaattcaagcaggagagaaagttggtccgattccagctctattgttatcagactagatggccacacccgggctttcaacagagccatgtttcagagccttatctaatcaaggcaattatgaagtgatgatcattagggtagctccctagcttcggatggcctcgtggtgctgggtccaggattcagcaaagtgtgttcctccactggtagcttcctcctggttagttttcaccaagagggatagatgctagagactatccctagtagggagaagaactgcccttcctgtgagctggctgttcctggtcttcctaccagtaggctggtctctgtctgaagtttatgtcactgctcccagaaagagcctcatgtcaccaactggagtgtccacaacagccatgtggtatccaggcttagaaattgggccctttttccatggagctagtcagtaagggacttaactaggtgggtaaggatttttcaaccctattgtagggagtgatgattctgacattacatcttgttccccagccactgagttagtctctcccattctctcagttcattaactcatgaacacattctgttagcatgttctgtgtagttacagtcttcctgggtaagcattctgtggtagagggatgttcaaggtgaccttcatgacttcagaccaattccttccccttaagtgactggaatctaaaccacagaatgtgacgaaagggcttcacattcataattaagggcccctaaatagttgaatttgcattcacaaaagggaagattatctgggatgggtctgacttgatcagaggaaaacccataaagaagaatcaggccctccctgaggtcagagaccttcaaccataaagaactaggggttagcttcaccaagcaacactctaagatcatgcagtctcaagcaacactctaagatcatgcaatcttaagacaacaaatttggccaacaaggtacatgagctgggcagaagatcccctgcagcagagccttcaggtgcaaacaaacaaatcccagttaaagcttggacaggagccccaggagccctgaacagagcaccagtaagccatgctgaggcactgatagaaactgcaagccagcgtgcactttcttttaagctgctggacatgtggcagtttgttacaaagcaacagaaaatgaatacaacctctaaaagcttcccatgaggcaaattaaacataatatttaaactatccatgaaaatccccaggaaagctgacactgacgcccaacacagccgggcttcctcttctaggttagagcacacagcaccagttgaagcaggcggctttcacttagggaccacactgttcaaaataacatgtgttttgaaacattagactcactttcaccgtaacaagatatcacacaaggaagctgagatttatgaagagggaagcagtgtctccctcacacccacaacccacagctctgtgactagcatagcaaggaatcccctgcctatttacagaattctactgctgaagtcttaattgtgtttatttaagtcggacaagaatagcacgagatgcttctgcatttgagcttttgtggttgtaattttaagttaacaagacatttgtgataagtattggagaagcttccttttttgttgtttgtttcgagacagggtttctctgtgtagctttggagcctatcctggcactcactctggagaccaggctggcatcgaactcacagagatctgcctgcctctgcctcccaagtgctgggactaaaggtgtgcgctaccaaagtccagagtttttgttttttgtttttctttaagatgcttactttatcaaagattgtatggaacctcccaatagtccattgatgagagagagagagagagagagagagagagagagagagagagagagagagagagcactcagaaggaagctgtgtcagaccatctttctgtaaaagaccacaataaagacactggagataccagttcacaatcccaaaaatcacagttggtaataagtgacatcagtgtagatgtgtcatggatgatctgaagtgctgggtctactttccacagactaaactactgtagtggcatcttgccttgccatcgaacgtgtggccacacccttagtccgtggcttcaggtgtagacccgacctcttataaggtagaggaggggccggctcttgctctcttgggtttcagagagcattggaagggcagagactgtatcttctggaacaggaagaccaaggcggttatttactcttatctgtctaagtgcttccctaataaatacctaattatcatttatcttgggtctggtggactcatttaaaccctgccttcaattggcacccacgtgggttgattcccacaatcagtccttgaggctggcccaccatggcattccaccatctagaaccaaaggcaccagcctccctgcattcactgggtcagatgagccagcccctcctctactgcacctgaaaccacgcccaagtccactggcaaggcaagatgcctctacaagctacctctcatgctacagaacagcagtagctttttaactggtatcttcttattcaacaaagccaaaacaaataacccaaggattgcagtttatttacatgccctttttcttggtcttttgggacaggatctcactatgcagcccacattggcttggtgatccctatgtaattgaggctagcctccaacttgcaattctcttgcctctaccttccaactaccggaatgacaggtacacaccatcttgacaggcttaaattagcattatggtatgcaatatttttaattttcaaatgtttcttaaatcagttctaataggttcctatatatgttaaggagttaattgagtaaaaattcagttttgggggctggagagatgactcagaggttaagagcactggctgctcttccagaggtcctgaattcaattcccagcaaccacatgatggctcacaaccatccataatgacatctggtgccctcttctggcctgcagggatacatgcagacagaacactgtatacataataaatacataaatcttttttaaaaaattaagtcttgatgtgatctagtttcttattgtatgttttttttgaaaattatgttttaaccaatgaccaaagcagaatgctgaccacatgtcaaaagcatcagccctttctctagatgatatccaggtggaaggagactgaagaaagacctcatggtggttctcacctctccatccttaaaaggtgtggcttctattttccctcagctctgagtggtgaaaaatctcagacacatccccagttagagaaacaaggcccaggggcaaaggctggcccatgagtcaatctggaaactgtccaaatggaatctgtttaggcacggtagtcacagaaggcttcatgaaaatcaggaggaaaggcccaggatatgagtaactatcacaaacaaaagcccaacaaacaaaaggcaacaacaaaggactatgctccaagtaatgtgactcacctgagtgccacacagcactgcatctgtgaggctgggttagaactagtcaggtccaatccctacatctacctagcaaactttttttagtactagcaaatacatacactaaaagcaggcttcttattttcaagagtttttcatactctactccaattttcctgtttcagtaggatattctgtaattcaattctgacatggactacctagagttggcatctgacttccatagggctcagttcccttcacaaactaatcacaagaatgaggtagacagactacccacatctcagctcagtgatttgccagaatggtgcatgggactgaagaggctatttgacttccacttaccagatgataataaatgtcataaaacgaacagctaaatggaaaggggtcatagagtaaggtccaggggggtcctcagcatagcagtttctgtccccatagaattgggacatgccaccttcctgcacatgactgcatttgctctctggaagctcttgtaccccattgtttaggagcttttaagaggagttccccgctggcaggcattactatgaaatcaatggctacagccaggggagtaagactgaaagttgcaagtcttggtctctggtgactagccttcatcctgaatcaatccagggggctcaaccaagaatcacctccttagaataaatacagacacagttgaaaggtactctgttacaggagatttgagcaagctatgtaaagacatgtagctgttttactgggcctgcctaagacacctgattggcttaataaagagatgaatggccaatagctaggcagaagaaattaggagggacttctgggaaagggagggactcagaaagaatctaggcacatgagacagaccagcaagacatggaaagagttgggcatacagaatggaagagaggtaaaaagccacatggcagaatgtaagttcatagaaacaggttagttcgacttataagagctaattgggaacaagccaagaaagtccaacatagctgtgacaatgcatctaaatagttatgcatctctgctaaataacaaaagattgttcagaagcaatgattaaaagaaaaaaaaaaagatggggctggtcagccagggtaaacaaattagtgagctccaagttcagtgagagatcctgtctcaaaaaagttagaggacttgggagatagttcagtcagtgactaaagtgacaggaagacctaagtttggattccaagcaggcatgaatgcactattctacaaatcccagctctagggcactaaactaggcagatcccgggagctgagagatagtttcaggttcagcaagagacactgtctcaaaaaataaagaagtgattgaagcagacatcctatcctactgttgctattctatgcctccacacacacccatgtgggtgaatgcaactcccccacacacactacatgcaaagggtatgtgcttacaagacacatacacacccagacagatgataaaagataaatgatgatagatagatgatagatagatgaattatagagatagatataagatagatagatagatagatagatagatagatagatagatagatagatagatagatgctagttagttttttgtaagcttgacacaaagtattatctgggcaaaggaacctcaactgaaagcaatgtcttcatcagattgcctgtaagctagtccatggggcattgtcctgattaatgatagatgtgggtgggcctagcctgctgtgggtgctcttggtgctataagaaagcaagttgaaaatgggcttctgagggacaatacccaaaagtgatctccagcctccaattacacacagacatgcacacctgtacatatttgagcacacacatgcgcgcgcgcacacacacacacacactcacacacatcatattaattttatacatgacagcacacttgtaaatgtaactgtattattctgggatactgcagtgcacacttgtaatcccagcatgtcagagactgaagcagaaataccttgagttccagactcctctagagtagactaggagaacctgtgccagaaaaacaaggaaggaaagccagggagtggggaaaagaacagggagggggacggggacaagaaattaggggaaaagaggggagagaagggaaggaaaccgtagggaaaagactgtaggggagaggaaggaaggagggggaagggacaggtaggggaggagaagggaagaaagggaagttcatgatgtctttcttacagctacagaaagcaaaccaatgacagatagacaggtacacgcaaagaggacagtaaattaaggctcaaaataagcaagacctggcagcacaggccattgatcccagattctcaggaggtggaggcaggaggattgcaacttcaaggccagcctggattacttaatgagaccctatctcaaaataaaaagtgaaaaccaagggctgtgggtattactcaatagcagaacatttacttagcttgcatgaggccctgggttcaaaagtaaattaattaaatgaatcttaactagaggaatatgttaacagagttaagagataagactagttgaaacctatgaaaaagaataaatcacacaggcgccccagatgattaagtgacaggtgtcctaccccaccccccacccccatgcacagagcatctatcatttcttgtctttcaaaagatttctactgtcaggagctgccagcagctttcctgaggctgtgggaggcccttctgcatacacctaagacaggaatgaacttcttcacaggccaccttcactctcagttacccccacccagtgaccctagggagtgtgcataaagaacttcactgtcattccctgtgggagatccccctcaggctggcatctcctcctcagatactcctagggtcctgtcccagggcccacagtggtggctgccttcacacatccatagtgcttccttgctccctccagtgtcttcctgcacaaagcaaatacaccgtcaaaatcaaattcttatttcatagaaaatccaagccatacattgagtttttaaaaagtttatatataccaagactacaggatgcctcagcaagtaaagctgttggctgccaagcctgatgacctatggtctaccctcaggacccactggtgtaaagagaaaaccagctccgccaaagtgtcctctgacctccacacgagcatatgcacccatgctcacatacacagaataaacaatgggaaagcgtctatgcatatagagagggagaaatgaaagcaggaacagaccacattagcaatgacacagcttagccacagactgaaatgacaggtcataagcacacatgcacaggttaatctttttaaatgtttccatataaaattttatgtcagcttacctgaacattttgttttgttttgttttttgtttttttgttttttgtttttcgagacagggtttctctgtgtagctttggagcctatcctggcactcgctctgaagaccaggctggctttgaactcacagagatccgcctgcctctgcctcccgagtgctgggattaaaggcgtgtgccaccaaagcccggcttacctgaacatcttgagaaaatggtagatgtgtggggaaatataaataatcaaaattgggttagagaatgcaaagggtctgacaaactaacccacaggggacaaactggaaaaacattgccagacagtgtatccttagaagatgacaggtctggatgaagagttcctaacgtgactgaaattcatgtgtatttcaaatacacagtcagtcactaatactaacaaaaaggggaatctagagtactaatagcggatagaatagatttcccagtcataaatgtgactaaaatagcaccagaaagagaaaattacagaccaacctgacttatgaatatagatgcaaaaatcctgaataaaatattagccaattaaatgcagcagcatcataaaagaataatgtaccatgatcaaggaggtttatttttgtaagaatacaagtaaggaccaaaattagaatttctattaataggatattaccagtacgaataaaaagattaactcaatagggactaaaaacttactttttttgctacttaaaaaaggaaaaaaaaactaaataatctggagatggaaatatttatttaataggccaggaataactacctcaatcttggagaacttctccataaagttagtaataagatccaaatggttgttattgccactggcatgtcacatagcagtggccatttcagtgcgcaaccctaagacagaatgtcctgctgatactacaactaataataataataattagatgtacagacatcatatcagaaacacgacagtacatagctttctgaaaagaaggtcttaactatagtaaacataactgtctaccttaaaaaccaaagatacagtgaaaacaaaggccacccaaataaaaacagaaactatctcttcagggcttgctagtagcaggaaggtgaggtgtcatcacttgcatctggaagattctgaggctcctgggagtgtttctgtgttccctgacaggcattaaatgtttgtcttcctatctcccttaaccagctgcccccaattttgcaggttgaaatcctaatgtggtgttgtttaaaggcgcagcctgtaggaagcaatcatcagatcctgacagtagagccctatcaatgggattagtatctttgcaagaagctgggggtggccgggggaggaggtcggtggaaggggggcaggagctttcaccttgcattctcccaagtgacgctctgagaaggccaatgtctgcagcctggaagaaggttctcatcagagaccagcaatgtcacattctgaccccaggcttcctgcttctggagctgtgaaaaataattgtctatcacttataaaccacacagagtggctcttggacagggcagtgcgaaccaaggctgataaattgctggtctgggaagccagagacagcctgactggaagcagcatctatgagactgtctcggggaacatatttcatgttccctggttggtcctggcttggaaatagagggaaaaccttggagaaaggctatttttagctgagtcctggctttcctgtgcccatgaatgctgcaaagctgctttggctcttctactacttgctgcaaaggtccaagttctgtcatcacatatggtccagccctggcctgcttttatgctctgtccttataacaatcagaaaataaagtatgcagttacaacctagtttgttgttgttgttgttgttgttttaactttgagttattcagcactctgttttgttttctcgggttttttgagacagagtgtcactatatagctcaggctggctttgaactcctaactgttctgcctcagcctcctgacttccgggttacaggcatgccccgccccaccatgcctagccccttcagccttcttggattactgttctcttaaactcagagaatgcctagctccctcagtccacgcagcacgctcagcatccgtgccattgagtatgtttctctggggactttatttttcctctgcttacttcttgctgtaacttctgtcacagacttctcagtctacgtagtggatgttgggcctgtaacttcactcaacaaagcaccaatatccaagagtgttgtgcggtagtctcctcctaatcattgggccgactgtgtttcaaaactaccccaggagataaaagtctgaggcaatagattgcactgtatactccatgctttgccccatacatatgattaaatttaatttataaattagacatggtaagagatcagcaattaacaatgaaatagagcaattaatatactgtcttataaattatgtgaatggggtccctcgaaaatgtcttattgtgctttcaccctcattgagagaggatgccctgtgttccttgtcacctctgaattgccagcatcaccactcctgtgctttgggaccattgttaagtaagacaaaggtcacttaaacacaagcactgatacctccagttgacctcataaccaagttggataagtggctgatgggcaggtatggatacctgggacaaagacaagagtctatccaggcagagtgaagcagggctgcataagacttcatcacactcctcaaagcatgtgatttaaaacttggcaattatttactagtggggttttccattggacattttaaaattacagttgatgactgaaaccatgaagaaaaagaaccattgataaggcaggagtgctgtagagagcagacttgtcctcaggacgactggggaaaaaatgcattcattgcacaaacagacagcaacaccaagtgtaagacatcccagtcataaagtgtatcttccctttctcagcaatagggacctaatcaccctccacctcccaaggccaggaagagagagagagaggaatgaaggctatttccatagctgtccaggctctatgggaccacctagggctagggaagtgcaggccaagttggggaagtttgtgaggctggcctcccagaggctggcggctctggagttgtctgggatgcaggttccaagggaacacctggggctgatgagttgctggaacagtctgtagctgatgtgaagtctcctgggacaaatagactagggacagaaggtcaagttcaggaatttagggtaaatttttgatcttgggtgtacacttgaaagttccaggtccttagtcctggtggttaggggagggattcccaagagtggggaggtggggtggagagagacaaagatcccatcctcaggaattggcagatggggaaactcaggagtacttatctagaatccatctggccttccagaggtagatccaagtcaactacctgaagcttacataaattttcttaagtttataaaaagagataagagtcttagatatgttagcattcccactgtttgtagtctgtactgaagtccacactgtagaaaaagcaggagactcacacctttgagtcatagaaaaagcttaggaacccaaaactgatttggggttaaaagtaactggtagcaaggtaaactgcctctcccagctggatacctatagctctaggaaagtgaggcctaaggcctgatttttactgtgaaggaaggcagctatagccttggggggtggagggagctcttaccgcttgctgttgttaaagctaccattagctattcaatatcatcagagatctgaggaggataaattatagcaggaagtgtaacactaatggcctatttatcaattaaaatgacacttacccactacctagacagttactctaggctcctgtggtctcaatggcttcactggggcaatggtcaatcttcagctgtcatacaggacagcgtttcatcttcagcttccacatagagcagactcaggtctgagagatttttctgcgagatttttcttcggaggaagagcttgtgggacagagcttttttgtttgtttgttttttgttttttgttttttgttttttttttgtttgtttgtttggttggttggttggtttttcggggcagggtttctctgtggctttggaggctgtcctggaactcactctgtagaccaggctggtctcaaactcacagagatccgcctgcctctgcctcctgagtgctaggattaaaggagggtaccaccacccccggggacagaccttatttgatcaggcagaatataggacaatctcccccaaagtgtccacagtttgtacagagcactagtggccagctaggagtggacatgtctgtctatcattaaacactttgaatgccataaccagcagatctctgaagagtttgagaactatctattaagtatacctgagctagttacttgctttaagtgttaaacttaaaggttaacttaaaagcacgtacaggaggctaaacaaagcttgtcactaaatgaattacataacaatttactcgttagtagcttttataagattaggactttacagctttattcctgttcaatctgagactttaaagtttgagtaaaagatttagttgaagttctttagcatcaaaatagaacgttaaaccataaataatagagagacagggaattttcctgatccttttatagtgtatcattacaggatatcacaggtttttttataactcagttttatagaaatagcttaacaaaatgagaaaagacaaagaggctagacaaatattactgtgaatctgagtacaccttgggaatttatcaaccttatttatcaaacttacattatttatgaaatatatttttactaaacatggtttttttattttaaaatttctagaagcctggtgttgaacagatttagcaaagacacaaatacttagaaataaatttttaaattgggttttattaacctgaatatacctatatagccttggaagttaaccatcatataaaaatcctaatccaaggtattttggaaacctaatgttggtttttttagtttaaagggagacacaatgataaaccaaggactcagaaggactaagaagtttttttgttttgttttgttttttcaagacaggattcctctgtgtagtcctggctgtcctggaactcgctctgtagatcaggctggccttgaactcacagaaatccacctgcctctgcctcccgagtgttgggattaaaggcatgtgccaccaacactcggcttgttataagttttaagctaactttttgttacagattttatggatttttttaaccatacccaaagaacttacaaatcttaagacagagtttatagcgtagtcttaaaagattttaagagtggaaagtaggaaaacctcggcgataagagacttttggaagtgccaaagcagaacaagtttagatggaagagatttggggatcctctgtgtgtgacagaggctgttaccttgtgaggagaatttgaaataccaatgtgtcaatcttgggccatcgatctgcactgaggccaagtggtttgtagtccaacaaggagcgggtgttgaaaaatgaaactccactggtaggaatttctataagctccaagagggagctgagagacgattcctagtggcctagatgggctcaggcttagaaaagctgcagaaggaactttgcccaagaggagagatgcctaggagggcttaaggaagagacagcaaacagctgactgcagggggagctgagagctggctagtgggacttcagacccctagggggaagggagagggcagggggaaagagatgtggtgtgcttagtagagatacccacaatagcaggtcagactggagagatgctagacaagtggccaggtggaagtgtctgtgagagacacttgtggcacagacaaggagcggaatggctggcacacacgaaggagagtagctgagaaggctgattcagaattttgggtctaatttagtagttgcttaatttgtttgtttgtttttgtttgctttggatgctccctacacaatacaaagttgtcaaaaaaaaaagttaactatcttagtagtgataatttgcaggataaattccacttgtaatataaataatacaaaataagatgcttagtagtaagcattaaaaagtgtataaaattaatataaagaaaaaatgcaaacctatttggggaagacataccatatttatggatggcaaagcttgtcacgaacaggaggggatggggaaaggaagaagagggaaggaaaaggtcaatgttttcctattctttcataaaactgactgatgtaattttactgaaagtctcaaagggatttttttgcaagctagcataattaacttaaagtctaccaagaagaacaaataagaatcaagaaaacattgaaaaaagaggaacactgagggtctgaatacttcatccccagctcatattcctacttggggaagtttggggaggtagagccttctggagggactgggttactgggcctgtgccttgaggtttcatagcctggcccctcttcctggaatctctctgcttccttttccaggatttgtgggaggtagtaggtacactctcctgtcacaacagaaatacctgccatgacctttcccctccagggcggactgtatcccctcaaacagagagccaataaaccctcccctcctaaagttgcttttgttgggtattttgtcacagaaatgagaaaagaaactaacacagatatctacattgtcacatattaagttatgcatcaacaatgaaatcaaattacataatcttgttacacgagcatacagataaatcagaggcctaacagaaagccccatcacttaagattaagttcacttccaataaccaattaaaaaaatataatgtaacagtgatttaaataagaaaaactagcaagggaaaaacaaataccagcttattaatatgtatgccttatatagatataaacaaaactcccagaaaaaaaattaaatttcactccagtcaaggaaacaggtaagctaactggaggtcttcaccgcttcctcctgccctccaaatccaacacttccacccccattcctccacccctgactcacagtcaactctgtaatagatcacctgctatggcctccccaccttccctctgtcctcatcgccttcaaccatgcaaatcttctcctccaaccttcctccccactcatcctgctatcccagcccctaattccagcaggcattcctcagaactaccagccatggaagcaagtatgccagctaagaaggtaggtgatcttcagcttttccctctccctcttctcctccatatcatccccagctctgtagtagactacctgttgtggcctctcctcactctctgcccttattcccagaggactgagcagatactggtggaacactttgctttcttcccacccgtggacacccctcagacgcccccagcatcattggtctcaattccccaataataaacggactgacagaatggaggaaaaaacaagatctgtccttctgctgcatccaaaaaccacacttcaacatcaacaatagacatcacctcagaataaaagaatggaaaacgatattccaagaaacagacctaagaagcaagctggtatagccactttaataactgacaatatagaattcaaaccaaaactaaccagaagagatagggaaagacattgcatgctcatccaaggaaaaatccattgagagaacattgcaattgttaacatctgtgtccaaacacaagggcacccaagtttttaaaagaagcatgactacagcttaaatcacgattgaccctggggctctgataatgggagacttcagtacctcactcttaccaatggacaggtcatccagacaaaaactaatcagagaaatgctggggataactgacatataaaccaaatggacctaacagacatttcacacaacagaacatttcacacaaacacaaaagaatacaccttcttctcagcacctcatggaactttctccaaaattaccacatgctcacacacaaagccgctctcaacatatctgagaaaattgaaataacatcctgtaacccatctgactaaagctggatatcaacaacaccagaaacaacagaaagcctatgaactcagggcaactgaaaagctcactactgaatgaaaagtgggtcaagaccaaacttcggaaagaaatgaaagaactgagtgaaaattgaagggctcgaataggcccaaacatagcaagcatgacaccacgggccggttttgccctcctgcccccttgctacattgtcagattcccttatttaggcacttctacattcctaaggcgagctaccaagggccattcccttatttggccacttccttatgcctgactcattcctgaggctgctcaccacggacatccaactatcaaaacatcaaggtcttgcaatcaaaactcccatttggcctccctaactaacatgcccaatcaaacttaccaactcatgccagctccttctaacacagacctcccctttttgcccgttaaaatcactctgcaaagctatttgctgcggtttctgcccaattcagattcagtcaccttgtctctttgccttgcttaataaaaaactcttttgtgttggaaattggtgtttgggtgtggtctgtgcctaatccagaggggagcgccccatggttcgagggtcttttcaaaaatgaatacataacatacccaaacttatgggacacaatctggtcctaagaggcatagcttcttaggctaagtgtctaggtaaaaacaaaaacaaactggagagatctcatattagtaacttaacagcacacctgaaagctctagaacaaaaagaagaaatcatacctgttggggagctcaagctctgtgcaccaagtggcagcccctctccagaccccgccccaaagaaagcccaccaagcagcggctccaccttgccagtgtattaaggtctggcccatggacttccccttgctgtttctcctcttcccctgccactacccagagatgctttgctcatattaaattaggcctgatctgatttatttcattggcagagagacttaatatcggggtacagaaacttcaataccccaaagggacaaatggcaagaaataatcaaactgcagcctgaatcaataaaatagaaacaaacaacaaccaaaaatacaaagaagcaatgaaacaaagagttggttctttgagaaaaatcagtaaagttgagaaactcatagccaaattaacaataaataaataaataaataaataaataaataaataagaaaagaaaagaaaagaaaagaaaagaaaagaaaaaaaagggaacatattaacagactccgaggaaatccagggaatcataaggacatagaactatgtatccacagaatattctaggtcttccttaatatctgctcacagcctctactcatttattctgtctccatcacccttcaccccaggcttccttgaagctgagcaacactgaggcaagggtgttgttactagcaaactcttactgagagatgagtgcaattacacaagaaaccactttgcatagcacaccagacatcccagccacaggaagctcactactgctcaagcatctccagagaagtcgccctgttctgggttcctgactggttccccaactcatatctcacctcgttgtccctgatgctctcatcttccttagtgttgggggtctgaatctgaaatgcctcccaagacacacattttgagcacttattccctggctgatttgggagatggggtctagttggtggaaggaggtgattgggggcgaggtgctgaaggccatgtctactcctggtgtggcctatgctgtttcctcatctgtaccatgactagccactgacagagccacacattgtaccaccaccctagtcatggtgaagcatagccctctgaaaccatgagccccaaactcctttttctcattgggctgttcctatcaggcatgctggttactgtgaaacagaagaaactagtaaacgcaatctctctagttgccagcatatcacttaatattcggctttcttcgtgaagagaaattataaaactttttagtttcttctctcctagtataggggtgagatgtgtctactactcagcttcatgaagactgttagaagtgtctctaaatttaaaagaaaaaaatcttccttgagatattctgtcttaaagaggcagaaacaccttcaatgctaagggcacatgtgtacagatagatataggtccttttctttacatgtgcatatggcaaagaacataaaaaagactggaaatgcattctccaaaattctaacaacagtttcttctgattgttgggattacaataacattttcttttcattttgtgctaatatgctttccctaagtcttctgaaatgagtttatattaattttacaaaaaaaaatgtctttaagcaacaagatgtggggacccaaaaaattcattcttttgttacaaaagtttactattcaaatgcaaatgtatttcatcccatctccactcctttcagcccctagttctcactgatagacttagaagaaaaagcaggtttataaacagctataattaatgtctaacgtatgtatttcaaagagcccaacagacaaagatgaaataagagcaactactaactaatgggcaatcgattcttagatccaaaatgtgggtgaagcctgtcctggatttataccacgtatttcctggatttataccatgcatatctgttcagttgtattcaatcaaatgggttgacatttggccagattcatggcccatgaattttaacaagagatagaatttgataaaatctatcaatctcaatgtttagttttccaaaaatatttatgtcagccatttatctacataaaatatgtaagggaccatcgccccagcctgagatcaaatatgaaggagatacgtgcactgcattgggtgtgtcccaggctgaacagcatcctaccaagttcatgctacaaggaacctcaggatgggccataatccagaaatagggtcttgcaaatataactagttaagtctttatgtatttagaaaagaattgatcaaaggtaaagtggaaagtgtggttgcttggcaggacagactagaataagaatccataggcaacatggagttcttgcaggcagagctgggaaggggagggagcaggattctgctaataatcaccgaacaggagattcttgttgagtagcccaggctacccttcccactctgtatctcagaccaagcctctcccaggctgaatcagtctaactagccctgctgcccatgggcctgggaccacttctccacccagacttctttcccaccctttcattacctggtttgtcatccctagcttaggcttcctgagcccttgctccaccccttacaccttgcccccacataactacatcctacacacacacacacacacacacacacacacacacacacacacacacacacacacacacacacacacacacacacacacacgtgtagtggcttcaaccatagccaacaggcaactgtccagctagctaactcacctccctggggctagaaagacaagatgaggaagagttgggaatcttttccattcctgagaccttgattcattcctgtgtgaccaggatctccaagcctatataaatctcagactccagtttgacagatgccacaaagcaggcagggaagcatcagtctcttctatgtcagggctgtgtgtttgggtgtgttttcatgtgtatgcatgtataagtacatatgtatgtgtgtgcacacacatgtgcaagccaaaagttgatatcaggtgttttcctccgttactttacaccttattggtttttttgtttgtttgtttgttttgctgggttttttttgtttttttttagttcaaattaggaacaagcttgcttcacatgtcaatcccttctccctaccctctcccctagccctccctccaatcccccgcctgccccaacccatccaccctccactccccaggcagggtagggccctcgacagggctccccaaagtccaccacatcagcctgggccgggcctaggccctcccccgtctttacaccttattgtttgaggtactgaacccagagggttcaaattcatctaactggctggccagagcgccccaaggatcctcctgccccctcctccccagcactgggattacaaatccgtgccaccgtacccagcaattctgcaaatgttggagatgtgaactcaggctggtgaagcaagtgcttaacctcaggaggtatctttccagcccagtttttatcacttcctgctggcctctagcagatctgcctgtgactagctcccatctcctcccttcttgatgtgactcatatcctatcctgttctgtgtatctctcacctagaggggatctcatgataacttcccaatccttcagtggagaaagcccaactccttggcatgacctccagccctgcctctctctgttcctgtttgcctcagttcctcacctagtcctagtttgcttctctgttgctgtgatcaaacaatgaccaaaagcaaccttggggagaaaatggtttatttggttcataggttacaatctgtcatcaaggggaaacaagataggaactcaggacaggaacctgaaggcagaaactgaagcagaggccatggaggagagttgcttgctggctggcttcccatgactttctcactctcctttcttatacaacccaggactatctccctaaggctacctctgcccatgatgggctaggccctcacgcttcaaccagccagcaatcaggaaaatgcctcatagtcctgtctgatggaggcaactcctcaactgaagttccctactgttcccagttgtcaagttggcaaaagctaacctgttcgcacctgctgcaactgcccatccgcagccccaagcaccctgcttttatggcaatggagctgtatatgtccttctttggcgtctccttggctaactcctacacggcttcatgacttctcttccctggaatgcctaccctgccctagcaccaccagtcacagctgccatcaccttcctgggcacacctctggcccagcagttgtcactgtgtgccaacagcctatttgctttgtatctctcccaccagactttgagctccttgaaggtagtgcctgcaaattactcatttctgtccccaggcctggctccaccaaggataaaagatgaagtcataaatgaatatgggaatggtgttataagggcacttctgacacttctccctgagacctaccaggaccagactagttaaaggaccggtatccttgctgctaccaagtagttaaatagccaaagttaccgtccggtcctaggagcttcccataatggaggaagcttgttcttgcaagagatggtggggccagtgatgtctctggagatgagtaagctcccctacatcttgtttaagcttctttccaaagacatatcttgcacctatttcctccataggtccttacgctgggaagcaatggagaccctgtcttctatacatacaccttccgccttaccacactgtgcgcctctgacactgggcaggcaaggagttagacatgaggtgtctggaaaactgcagctgggtcctgggcagctgctctcctgacagtcagaacactgctttctggtgaaacatccttgaagtgctgttacgttgtttctactgtatcagaaactaagcattctcccatacatgcccacgcacgaaagacttacctcctccaaagactaacatcctggtaacatcacttacactgtggtttttacaccacaggggaagaaagttgcggaagaaatagcctaaaaagtcctccatgatttggggaaggcaaagtgtcacctaaccctaacaatattccacacacctcctaaatgttcactgagaacttctaaaattcacaaccagagcctactgacttacttcccatcttggagccatccactccaaattctctgaagtgtttgctttccttaatcttgctgaataacccgaatggattccctccttcaagaagacgagaacccagagactttgaagcatccccaccgccagcacttccccatccccaggctttctgctgctcccacctgtcagggtgagtcttcatcttccgcctttcccttggactgctgcaaggaggcccttctctttggggccagatggcagactgacacaggctccaagaccacctcgctgccatactgtagctgtagaagcagcaagccgccggccggttgcccagcgccacctggtggtcagattctttacacggctccccgctgcctgcctcttccaccccaaccaagccttgggacatccgcagcctagaggatacagatcctcctctcgggcagccagaacagggcttggggtatcaggccacagtgcccttgtcgagactgagcagccacagtctagaaacccctccttttgtcctcggccaaccagcaaggcctgctatccatacagaaggtgggtctcttgtccattcttgtgtccttcagagagatatagctgagtaacttcccgaggaggggaaagctgactcacctatagttcgcctgcaggacggttgcctgaagccgggatggggagaaagccccagtttcctgccctgcattgtctagtccggagctggattgttttagagcctgctgctggaggtgcaggaagtgggcgacaggcgaaggacgagttaggtagcctccaggtcaggaagatctttggcccatcattggtaacttgaaacaatgcaggtggtccgggacctcctcctttgagccgtccagggcccagcttagagaagactgtttggcctctggagaagggaggaattctctccctccggtagtcgctgcttcccctgactccttacagtaaattcacagctccagattcggaagtgtaacttggagttaatgacactgttcgtgggcctgagacactccggtatttgtgggctctcctgacagaacactgctttctggttaaatatccttgaagctgcggttatcaacaacaacaaaaatttatcctattttagttatatgttagtataaaaacaaatgtaatctaggctgggttcgtggttgaatattcgttattatatttatttttaaaatttcaatattgttttattttattttatgtgcattggtgttttgccttgattgccaggatccctggaactggagttacagacagttgtgagctgtgatgtgggtgctgggaattgaacccgggtcctctgaaagagcagtcagtgctcttaaccgctgagccatctctttagcacccgccttttttctttttacttaagatcgtttcaaacatcttcatgacccccagaaagcacagtggcccctagactccgtgttaatgagtgtggcctatgaaccctgtatcaatgatctttgcgcccgctgccggcagaagcagcgatagcggtctctaggaccaccggaaaacccgggtcactttgtaaagagtttatgggctcttgactcttatgatggcctctctgtcgtggaaaccttcaaaatagccagaacatccaggatccaatcagccaaccagtccctgacattttggttccagaatctagagatttcgctgaccctgtgataagagcacatggaattagagtgggattctatcattatagtcggtggctacaatagatggtggcacacgccgttaatacaagtactcaggaggcagagacaggcagacctctgtgagttcaaggccagcctggtctactatgcaagtttcaggacagcctccaaagtttcagagaaaccctgtctcgaaaaaccaaaaaaaatttaaaaaataaaaataaaaatgcatgtcacagacaagcctgggcacacacctgtaaactcagcacttgagaggctgaggtcagctagggctatatagcaggccttgttttctcatgtaacttggaattcaatagagagataaactaaatgaggctggacccacaaaactttgaatgacccacctaataattcatgaaagccgttagcaccaaagggcgtcataccaaacactcctccttcatggaagccttccctcggcagcccacacagctactcagtaaacgggaacttttctaaccaaaatatttttctaatcaacaaatctgccaaatcaaaccatcaactcgacgtctgggaagttatggaaacatctgtatttacctattaaactgttttagaatccttacaaaatcgcagcacagagtgagatcttacgaacccgttctggatcacctttacacatagaacaaataaatactgcttttaaaactaaagtgaaccattcggcacgttaaacggtaagaaggattgttttacattccgtgagtttcttaaactcaaagagggaaatatcaagatccccccacgtggagcaaggagcacctgtaagagattaggagtggagctgcttgttttacataaatagccgcattgtgtcctgaaattgtgaaacctggagaacccaaccacacggcctcttaaatgaccagttcccgtcccagttcccgtttttttaaacgaaagcttcaactaggatttttcaaatgtttctaactacaaataataataataataataataataataataataataataataataatactttttctgggtgaaataatctcagttaatggtgacagctactctttgtttcattcatcttcacagaagagttaactcatgctgttatgtcaaagccagaggaggctgaataaggagataccacagctaagccctgtgctgactctcctcactctttggtccttcagcgtcccctctgtgaagcagagggaggctgctgaatgaggagggaccggggccgctcagggcagcagacccccttctatccaggaagcatagctttaaatctccgctttccctttttgtcctttttccctgttaaaaactgatttcacctaattttgcatttcttactagccaaacaactttttgaactctctaccactgttaagcctgattttttaaagtgtttgtgtgttttctggattcccccaaattcatgcagggattctaagtactccccttaatgaaaatcccaagtaaaagactgctggagacacgtccacaataatgtagcctgtagcgtcatctgctggttcatttgtagtattgcagccatctagggttagaattaaaaggacagacttacccgtctgtctcttctgtgagtcaaaataacagaaattcttttcctgcagagaaagcagaaagataacctggacatctcctagcactgccgatatgcttagtcctggtcctggttctccttaattagctgtacagacttggtaggtaactccatcctcagaaccccatcttgggccatacggaggggctttgtaactgttcctcacaacactaaaatcaccaccagggccctatacacaaagctaggccatgggatgtgacttcctctccaaatttaggcatgtattatctctttcacatataaattgttttgaacaggttctttttcataaagaatcacacaacccttcaataaatttcacacacacacacacacacacacacacatatagtttctgttctgcagacatggtcaacccatatcaacatttactgctcctacaaccttttaaggctccatactaaatctttatgaactataaaagcaggagtccccgctaaggacttagatcgtggttgtagaataaagggcatcatccactcactccttaagaatcttgtccatcaattgggggatttttttcccccatgagatcatatctctgattttataacaaaagtcaacgggagagagatctttttacagtcagtctagctggaaggcatctttgctataaaactagtgtttcagaagtctctcagggaaagcacgtgacggagccgagctcctcggccctcactgtgtagcagtgttccttctcatgggaattgagtgccactgagagattggtgggcattgtctatggtgcttaaacaaagtagaagactctggtgttccaacacagataccaattctagaccaccaagggctgatgtgtctacagtgcttaaacacagtaggcaagactttgtttatatacacagacatccattctagaccaccaagggaaaatatgtaaaacatcagcaaatagtccatgagagtttatcttctcttagagaccaactcattgggatatttttaatatttccaccaaatactgggaaggaatttgttcttcaaacatgcaaataagacaacaatcatatcctaattaatattaatcattttctctggtcccaaagtttttcttttctttttgtttatttttttaacttgttttgttttgttttccagacagggtttctctgtcgctgtgaagcagtcctagaactcactgtgtagaccagtttggccttgaactcacagagatctatctgcctctgcctcccaagtgctgggattaaaggcatgccccaccgctgcccatcaaagtttttctaacagctacagctcatttaatcctcacagcattgctggaaagtaccctatttgtccccttgttacagaaaaggaaatggaggcgcatttattaaataacccattacgttatagttggctagtgtagactttctgtcgtgggctagaactgctccctgctctcacagatcacaaatcttactgtggatgtcattctgcacccagcagcaggcttggtggccattcacacaatccaagaatgtgacttctgtgcactattgcctactgtcatatgcaacaggaaggaaacacagagtcagcttcttttggcatctctgtctcttagcactctgcccaccatgatttactgcaaccaaaccgaacagtgcggaaatcatttgtcttctttctcagattgggcccacttggacagtgttagagggaaagcagtgacagttgtcacattacaacagccataaaacaatcagagtattagtattcaggcatctgcactggcctgcccttggggttctgacaggatacgccctcagctgcagccactaagagtaccacctgtgcatattcactatgttccgttttaaaagggccctacccacctcccatatctctctctctctctctctctctcttctctctctctctctctctgcttctctgcctgtctttctgtctccccaccccacctctcttttctgctgctcctgtcttaagaggcccgtctccccccaccccccttttccccattcctccccttcccccccaaaaaaaaaccctccacatgagctctgttgcatggcatctttctctcgagtgccactttttaaattacaacacagagtgattttgctcctcccctttcttctctatccaagatagttcaagaaacacttggtcataacatgtcatttccagatgttggctggaaaaaaggttttctttccaaatatgattaatctaagagcaccttccttatcccactctacctctgtctccagtcaaagaggaagacactccagggacacaggcaatttcccaggggaggaggtatcctaacttttcaattatcttcaaagacatagggccagtaaattggttctccgggcagaattcactggcatcacagacccactgaaggatgggtcttctctgatggatacattatgtagcaagcaaaacaaagaacctttctcagaggaattacataatcactgtgtcttttcttcccttcttgtaatatgtataatttgtcttctcttggaaaggtacccataaattttaatgcaatttacttaagaacaataagcaaagtcaaattttgctaatcacttttgtttcccaggagcaaggggaaaatcttaactgcatgctgaatggctagtatgggcacttcaaggcccacaaaggagaatgaaccaagatcctccaaaaggaatgtcatccctaatttgtcagacccttaaggcaataaaaaattgtctatgcaataatgagacaaccccaccctcaaacatagaatagaaatctttaggtgacattgtagcaggagcaactcaggactctaggattggagaaatagacatacacgcgagtacacgcacacacacacacacacacacacacacacacacacacacacacaccagcatgtgccctgagcaatgaaagaaaacactagtcacaggatttccggaaaggaaggatattaaggacattgtccagcctcccatctgatgcatttctttcctgtctacaagatgtttggcaaatgtttggcctccctgcctgttgtggggactatgaggaagagactgtgttattcagcatcgaaacacgagcttgtccctcgggcgactataaatcttaggtagtgttcactttccctgccagcctgttaaacaatctggggtttttctcaaggaaaacagaagctgcccatcattctcgatccactgcgcccctcccaccaggctccagaagccagtgtgctgcacaggaggcccacttttcaatttgaggatcaatacaagctaaataggtggtgtttccagcccaaagggacaacccaaatcaatgcatttaatgccctcccttggggattccctgatgaaaagacctacagggtagacgaggacaagcacatcagtgtgttacggagaccagggatgagtgagaatcacaaggctgtggtgccaaagtcaaacaccaacaccaccttcaggaggggaccaggagcactcggagaggaccaggtaaccccggcccgctcaaggcttgtagcggtctttgaaagcacagagaatagagatttgcttcctggcaaaaccgctatgtcaaagcaggggcagatagtgactggggttggggtggagagagggtggaaggtgagaggatggggtgggtggtgagagaaaggggataggggtgagagagtgggggtaaagggagggagggtgggcggagagtgtggggggaggagggagagagggtgggggagggtaagcttgttggggtagaggattattcagctgccatggcaaacatagggggagcccttctggcttaggtgaagctgcccaccccttccatgcaatgtcacttcaaaagcggttatagtgacaaaaatatacatttgtttcccatgctgagactgaaacatttccacagagactcataaatcaaggagaaccgctatccactcctatctagacaagcagagactttccattgtgaggaagttagcacggaggaaaaggaccagggaagagatgggagccaccgtgagagtgccaggcaaacttaaaagagctgtctgaatttattctaataaactatgacagtcaaagactttaaaaaaaaaaaaagatcctatgatcatccaggtagaaaaccaaacaaaataagctgttcacaccgacaaaaagcagatttctcttctgccatcttaaatgcaacaatgtcactcaatagtagaacagacaataaatctatatcatgggaaatgatacagcaatgaaaatgagtgtagtccccaacatgagattaagacacagcccagttaaagggcacattgttaaaggatatgcatgtaagagttaaaaactgtaactggaagtcaagaggatacgacctccaaaggggatggagaaggggcccagctgaaagcaagcgctaagtgcaggtgatatgtcttggtctgaatggtgagtgtgtgggtgtttttaaaaataattattctttaaattattcaaatggcctggcatagtggcacacacctttaaccctaacactcagaaagtagaggtaagtggatttctgtgagttcaagaccagcctgggctacataactgtatcaggccagtcaaagatagatacactgtgagaccctgccttgaaaaaaaatgaaataatataatacaaatgcataccatagattattccatacacataatgtgtttcacgttaagatttttttttactgatttatttatttttatttcatgtctattggttttgcctggatgagggcactggattccttggaactggagttatagacagttgtgagcagccatgtgggtgctggaaattgaacccaaatcctctagaagatcagccagtgttcttatcactgaaccatctctccagtcccaaagactgctttcaaaagattgatgaggtggctcgttggatacaggcacttgtggccaatgctgccagcctgagtttgaacccctgaatacacgtggtagaaggagagaactaaaactcttctctgacctccacacatgtgccatgacatgcttgtaccccactgtgtgcacacaataaataaacaaataaataaatgtaagttttggggggattgttttttgtttgtttgtttgtttttcaaaacagggtttctctgtgtagccctggctgtcctagaactcactctgtagaccaagctgcctcgtaaatcagagatccacctgcctctgcctcccgaatgcttggattaaggcctgtactaccacttcccagctataagattattttttaattcaagtagaaaacaatgtctgttatggttctctagagacacaagaccaggatgatgcatacagaaaaaaagatgcacatgaaaaagatttcttatgaaggattggcttgtaccatcggggagtcagagatgtatcaaaagctgacttctttgggttagatcccaagaagcatgtagttctaaccagaccccctaagggtatcagttccaatctgagtccaagtgggagagagcaagaacatgactaagggcagaaaatgggtgtgtttactcaagaacccatggcaaacctgcctttcttcacttttgtgttccatttaggccctcaacacactgggaaatggccccacattggcggggcaatctttaattagttggctgagtcaaaggccagtctcctctggaaccccagcatacctagagatggtatttttccagctctctgagcaatttttacccagccaaatgacacatagaattagtcactgctatatatatgtacatatctatgaaaattagctttcaaagaaattaaggaacatatcagttaatgcaataaaaaaaaataaccatagcaacagtgagaactgaaggctatgtacatttaagagaaaagttgacaaagtacaaaaggataagagaagggattacaatagacaaatcttactttgaaatgagatgcaaattttccaattattttaaaaggcaaattggattaataagtatactattagggtacattaggtagtgttaaatattgtcaggatttataataaaagaacacatgtggttcaacattagaaaatcttactataaagcattaagtttagagaaaagccacaggatatccgtagatattaaagtcatttgattttacaaaattcaacatgcatggcttatattaataaaacattggagcatcagagaaccacaaaacgcatatattttgacaatgaaaaatgcttacttcccccactaaagccaggtatgatatgaagatgcctgctagcatgcatgagctttgttagaagacttttagccacacataataaggcaagaaacaagtattaggacatatacaaactggaaaagaaaagacaaaattgtcacttttgtgtaactacttgaaaactcagaactgacttctatttttcctaatcctcacaatttgtccaattgaaaggtgtgcatagatttagatgtgaccactaatggttgtaatctctttcttttcttttttatttttctttttggcttttttgaaacatggtttctctgtgtagccttgtagaccaggctggcctcgaactcacagagatccgcttgcctctacctcccgagggctgggactaaaggcgtgcaccaccaacgcctggctggttgtaatcttaaatgtcatcaggaactcagcagacaccaaaaaatgaatgaagcacacggatggggattcttagaagtaactattcccagctctacacatttgtcaagggaaatcgtgagcctggttgtcagacagagtgatttctttaagagacatttataaagatggattttggaataaaacttcctggcttttatctttagacaaccaattcaagaactactagaacaaaatgtatccataggcaaggagttccggaggtggctcagtctgtaaagtgcttgtcacagaagcctgagggcctgagtctgtgggtgtgagactgtgacccagtcttggggaggcagagacaggaggctgtctggggcttgctgactagaaaggctagctaaacctgcaagttccacattcagcaagagaattggtctcagaaaaacaaagtgaacaatattggaagaagacacctgaccttgacctctggcctgcacacaatgcactcaggcacatgtatggctatagatgtacatacatatgaagatatgaccatgggtctctaatgtgcatttttgagacagcgtcttactatgtagttttgactggtctggaacttactctgtagactaggctggcatcagactcatagagatctacctgcctcccaagtgctgggagtaaagccaccacaacctgctaatgtacaacttttgattagtgctttattttatagctgatgtgcaaatatctcaggagaaaggtaaaatgaagcaaaactgattaactctctaatagcggaccattgtaaataaatatatttaagcacttttatgtcataccaaataaagttcataaatttcaaaaatgaaaccaagacaggtatggcggagcaagcctgtgatcccagcactcaagaggtggaggcaagagtttaaggccagcttcaggtatgtggcaaagttaaggtcatcctggatacatggcatattaactcagaagaaagaagagaacgtggaagagacgaggaagagagaggaggagtaaagaggaagagaccaatagcaaaaacatgtagacaaacacctacacaatagatggagaatgcttcccacaagcaacaatacatacaaaaatcataaaaggaaaagcagacattgagtacatacttttttttcatcagttcagctcaaaacataaaagaccaactcatgtaaggaaaaatatttaaacacagaagatcaatatcccttatatggagaagctggtctcagaaatcaataccaggtgtcttcagggaatactgaacacgggctgtggctaagcaaatcataaagtaagaaatgccgaaggccagtgaatataatgttcaatctcactagtaatcaaagaaatcaaattgaattttccctactgacttgacaaagatttcataaaattattttttaggctcagtgtcgacgaaggtgtttattgttaatagttgtctacatcaatacaccctgtagaacaattgggcaatacatgtcagaacacttttaactcagcaagcccatgtctaaaagtttagtttaaagaaacaactcatgcaaggatgtcactagcagaaaactagaacaaaataaaaccaacacaaatgtattatgaaatgcttaacatttaaagtctgaagaacgtcttcaagactattatttgtttttgaaagctattcagtaataccttgctcaggttttacttaaagttaaccttaaaatatatacaatgctccaaaggtgttaagtggggttctcactggactgtggagttatatcactgtgttcgaaaagttcactgaaaatttttgttcctgtttttcataacgaacatattgttttgataacaagaggaaattttattcttatgtaaaaataaagcaagctggagtctacacataaactaattggttgctatggctacttagctgtggggagctagaagaagctagatagcatttctgttttcatgttctctctcctctgtgtgtgtgtgtgtgtgtgtgtgtgtgtgtgtgtgtgtgtgtgtgtgtgtgtgagcgcgcacatgtttctactaaatatacacactgtatataagcagcaggcctggctttctacttgtgttttgcctagaccacttctaaaataaactcatatgctgaatgctaataaagaaagccaccccagaaataagtgaaaaacccaaagagagcttagacaggctttaatttaacactgtgaaaattttaaattttattgcaaataatccagagtgggttctctagctctggctcattagagtagtgtgtaagtaaagtacctagtttatcctagccacttggtacagttaatggactcacacaaatatttacaggtccaaagacttggcatttcttccaggcacagtgaacagtggattcctgccgactcctcaaatatatggaaagaaaaaacagaaagattttgccaatggttcaaggaagaaaaagtctgccctctgaaggctgtgacatatactacatgaacgtaagagtacattcaaaaataagagcatagatgtcagccgggcggtggtggtgcatgccttcaatcccagccctcaggaggcagaggtaagtggatctctgtgagttcaaagccagcctggtctacaaagtgagtttcaggacagcctccaaggctacagagaaaccgtatctcgaggaaaaaaaaaagtgtagatgtctgaaatacacaaagtatcaaattgcacgcttctgtatattaagaaggacaaagtaaggaaaggacccacccttctaaaatagtatggtatttgtctggcacaactggccactctcctttgcccattgttggcccaaacagacatgtggtgtgtgtgtccgtgtacgtgtgtgtgtgtgtgtgtgtgtgtgtgtgtgtgtgtgcgcgtgcccgcgtgtgtgcgcgcacgcgcgcgcatgcgtgtgtgatggcatacttgtggaaataagacaacaattttcaggagtccttccatcatgtggatcacaggaagcaaacacaggttgtaaggcttggcagcaagtgcctttagccactgagccgtcttgctggccctgtacattatctttctttcccttgttttttgagacagggtttctctgtgcagccctggctgccttggaactctctgtagactaggctggcctcaaactcacagagatcctcctgcctctgcctcctgagtgctgagattaaagccgtgagccaccactgtctggctgtaccttaccttttgatgcagtatttctcactgaacctggaaacaccaatctggctagagtggctagaaagcaatgtttagacttccacctgtctccagactacccacccacaagttctggagttatagacatggctttacacggctgctggagtcccaaactcaggtcctcatgcttgcaccaagcactttaccaagtaagctgtctccctgttcccagcacccatgatagatttcttcatgttagattgtcctgagctaattcataaataccctcccacacatgttcaggcagacccttgtttgtaagtacatctatagtctggtggttcccaaatgtaaatctgactgtcgtccccccacccccgccccccgactttaactaagagatcaacgtctcgaacttggcaggatcgattccagattctgtcttcctccctaaatctattccttccatccatcttcccagttcaccgaagagcatctcattgaccaaaccaaaaagcctatttcccttactttctcctgggcaccacatccatcagcaagacctctccaaaataacacaagtgcacactgagcccaggcacatctcaccaactcttgtactaatgcttgggtcttagttagggcttttattgctgtgataaaacaccatgatcaaaagcaactcgaagagggacgggtttgtttcttcttacagctaatacgtccatcactgaaggaagccagcgtaggaactcagggcatgagttcctggagcggaagccatggagcagtgctgcctactgatctgctaccctggcttgctagggttgcttccttactcaccccaggaccatcctcacaatgggctggtccctccaacatcaagaaaatcactaggaaaatgcactacagatttgcccacagggaaatcttatgaagacattgtcacagttgagagtcccttttcccaaataactttatcttgagccaagttgacactgaactaaccaggacagccaccatcttggtctctgatctgggtattgaaataacttcctgttgcttctcaggagccatgccctagcaagtatctacagtgattttgaacccctccctccctccttccttccctccttcttacctttattccttccttcctcctttcctcccccttcccttcaccctccctcctttcctctctctctcatattttttcagtgctagggatccaccctaagggcatgaacattctaacatattaggcaagagctctactactgaacgacatcccattttgctgttttattatttgtttggttggtctggtttggttttgatttattgagataacatctcattatatagcccaggaaatcatttttgcctcagcctcctaaatgtggggattataagcatgtggcattctattcaactccagagtggtatgtgcgtcgtgtgcttacatgtgtatgtgcctgttccaatctgcgtgtgtgtacatatgtgtaggtgtgagtgcacatgtatgtacgtcgtgtgaaggcctgaagctcatgttagatgtcctcttctaccactttccagttttttgaagcaaggtttctcactagacctagtgttctccaattccacctggtctagccgcccagcttgtcccagggatcactagtctctgtctcccaagtgttgggcttacaggtagctgccacacttccctggcttttatataggtgggggtctgaactcctatcttcatgcttgtgcagcaaacacttgatccactgagctgtctccccatccccctgagtgttaaaatatatatatatatatatatatatatatatatatatatatatcctgctaagaccacttagtgttgctcatatgtgtgcttcagagaggaccacttgggattagacaaacataaggaggctcatccaaggggaagtctctctctctctctctttctctctctctctctctccagacattgtctatagctcatctagggtgggaccttatgaaaaacacaactcttttctacttaaatctctccagtgtttttctgttatccacgagaagaaatgaaaatgtaacaagcctggatcgctcatcgtgtcccacgggcaacatggagaggttgagcctcactcctgccttagttaagttctttctggccccagggttttcttcccacttctggaatgtcatattcatcttccctgaaagctgctgcactcttttttaacatttacttgtttattatgtatacagtgttctgtctgcatgtatgcctgcaggtcagaagaagccaccagatctcattacagatggctgtgagccaccatgtggttgctgggaattgaactcaggacctctggaagagcagccagggctctcaacctctgatctatctctccagccatcaatgctgcactttttaaaggtgccctctccacacctctgccaaaggacttagagaacgctggctagatccagagcagagaggaagcaagaaggaacgtgcggacaaaactgggtggtttggtttggttcggtttgtgaacctctacaacaggcaaccagctcctgtgatggaccgtctctagttttctatctttaggttttataattccaagaacagaattagctgttgttctggtctcctgaaaccaaagaatcgcctctattaattaggttttggggttttttttttttgtttttttttgtttttttttggtttttggttgtttgtttgtttgtttgtttgtttcaagctccctggcagcttagcagttaggatttagcacaccccctttctctctctccctccctccctccttctctcctttctctctgttaattagaaggtttttaagtgaaaattaattgtacaaaatggggcttcaccatgacatttttgttcatacacctggtgttctttgataatgttcacacacccatgttcccctccaatgtccagcccacctctcactcttcctctccctctctcctaagagtacttagtccagctttcatgttcagttggttggggttttttaacattttatttttttttatttttttaaagattttatttatttatttattatgtatacaacattctgcttccatgtatgcctacagaccagaagagggaaccagatctcataacggatggttgtgaaccaccatgtggttgctgggaattgaactcaggacctctgaaagagcagccagggctcttaacctctgagccatctctccagcccagttggttgtttttaatctagattccacatatgagggaacagagtatttctggtgctgagtctggcttatttaacatgagctccagttgtatccattttctttccaatagcatcattgctttgctctttgcggctaaataaaactccatggtgtgtatagcccatatttccctcaccagtttctccgtttatggacactcaggctgattccataacttgactattgtgaataatgctgtaaaaaccatgattggccgggcgttggtggctcacgcctttaatcccagcacttggaaggcagagacaggcggatctctatgagttcaaggccagcctggtctccagagcaagtgccaggataggctccaaagctacacagagaaaccctgtctcaaaaagaaaaaaaaaaaaaaaccacccatgattgtgcagacatttcaataacacacagactttgattccttctggcatatgccaaggggtgggtggtatagctgaattatacagttgttctatttttcattttttaaggaacacccatgatttccatagtagctggactaatttccattcccaccaacagtgtgtaaggtttcctttcccctccatgcgttcacctgcacttgctgtcttttaaaatttgatgatgatgaggaggaggaggaggaggaggaggataagtgaatagggtgcacttttcccgcagcatgtggaggtttgtggagttggttctctccttctacctttacaagggttctggggaccaaactcaggctggtgcagttactgctttgacccctcatcaaagacttctacccattgggccatctggccagcccgttttctttatgacagacattatgactggagtgagtcagaatttcaatttgatttgatttccatggtggttaaggatgatgaaatttttataagaagaaaaaaatttaaacacccatagaacaaataacccagtcaataaatggaaaaatgaattggactctgttctcaaaagagaaagcataagtggctaacaattagcttatttttggaaaatgaaatttccacaatttggaaattgtggaaatgaagaaactgcattcgtgctactagaggagaaaactaaacaacaacctagctataaaccctttgatctcccatggtgacctgcctgcatgttacactggtgcaatggtggcgaagttatgggagcaaccaaccactctgtgattggatttaaggcccactccatgagaaagaggccctgtttgacactgggtggctaagaacctgggacaagataggacacggacacaggagaaaaccaaatactgctaaaggaatgtagcagtataacgactcctattgacattctttttttttttttttttttttttttttggttttttgagtcagggtttctctgtggctttggaggctgtcctggagctagctcttgtagaccaggctggtctcgaactcacagagatccgcctgcctctgcctcccaagtgctgggattaaaggcgtgcgccaccatcgcccggctcctatggacattctgctgtacccaaagatcagtgtctagctcagctgccatcagagaactgcagtagatgtgaacaaaaattagttttcttcaatacagtctcactaagtatacaaaacacttaaggcaggccccatgctcatgtctcataatgctctgtatgggtattttcaacttactggccttttgcttatatattatgtgttttccaattttgtgtttttatgaactttccgagtgtgtgtggtgtgtgtttgtgtttgtgtgtgtgtgtgtgtgtgtgtgtgtgtgtgtgtgtgtgtgtgtgtgtgtctgtgtgtgtgtgtgtctgtgtgtgtgtgtgtgtgtgtatgcatgcacgtgtgtacttcttgtgctctttcttgcattttctgattgattgtttttgttctattctgctttgttttttgtttgcctgttcattttccagagagagagagagagagagagagagagaaattgagttgaatgggtggggttaggcattagatctaagaagagattgggaagaggaaactgtgatcggaatatagagaatgaaaaatatacattttcaattaaaaaaaaaacaaaaagaaagaaagtgcactgaggttcagcagtgtgaaacccataatctgaagacgtgggtacctgcagtagtctcccatcattttccagacaggacacccactccatgccagtaatggtcatgagtgtggtcaatacctgaggtggttccctggctaatgagctgatctttttagatcagtcccaacagttaactctgctctggaaaatttaaagcctaagataaactagagactggagtgagggggctacctagagcttgtcactttctgtggaagtccacaaactgctcaatttctcccttcccacacttgttcgttcatgtctttctttagaagttgttaactagtctttaaacacagtctttagctgaagttgggttctgcaatttacaatctacaaggccttcaaaagaaccctatcttaactactttaattatctgttacctagaattaagcctcatgagctcttttcttaccaatgaccattggctaccccagagcatctgtgaaatctaaactcagtattaatgttggcccatgtgggacaatttaatatgtacatgtttgtgcatcattttgtacttttctgcaacagcctccatgctggatcctgttctctctcagcatttgctcacagttcatttttcaaccctcccacagcttttgtgagagaactgggaactctctctgtacacacaacaggaccctgtgcatgtaaaaccagtaaatctgacctctaaaaaggcatcttctctctccaaggaggagctaatgtctatgtctttcctgtgtttgcttctttttcattgtccccagtgatcctaaccaccagagcaagggcttggccttatagaggtcagggattcatttgatgagagcaacagacattgtcctaaggcagaaaaatgaagacatgtgcacacaaaattatgcatacaacccagattcttgggattctgattaataaccacatctctagctgtatttgtccagtttgggtcattacaacaaaatactcaagcaagctaactatacaaagacaaaatgtttacttggctcagctttggggaccatcttgactgtcatttcatgccaaaaatgtaggtataggaggaaagtcactcagtaaaagccaaaaaggctgggggtggggtctcacagtccctactaactgtatacccccatgacctaagaccccaccacccagtctccatcacaacccaccaccacaaaagatcaaagctccaacacttgaacccttagtagttgggtgggagcaaacatctgaactataccagcatctgtctaacaggtcccacaccactattgatcccctccttcctctggcaatgactcacccatacttctgctgccagagattgataaaacaaacctagcttctccctcttgaggtttattaccctcatgagatcaaacaacagaaactaaagcccactgcccccgccccagcacttagaggcagtcacacttagaagtcattgactgcatcccctgttagaataaccccaagacaaacacttataatttcctagattacagtttacctcacacaagctgcattttaagtggtttccttgccagggagacatttttaggcactaacggagattacaaaacagccgaatcctatcagccacagacttagcaagaattccttaggtgggttatttcctgggaagattatcatagtgattaatctcatctactttttgttgtcaatttcagtgggtgacatttttggctttgttcccagattccagagactgcctttgaaacctgcagcttcttatagaccatctctgccttctaattagaaaggagttttgaaaatgctggaagcttcaggaaaagccttctccaggataaattagaaaagaaatggtaaggagcagaaaagtggaaggaaggaaggtagaagagaaagaaaaagaataagactgcatgcaggtcagaaatggacagaatttatttatttattttttaaccagtgccttttgctttgaggcaggcagagttgtttcctctggcctctttttttttttttttttttgacaacaaataacatataactttaaaaaattattttggccattgaattaaatgaaaggaaccatgaaaatcacagaggctctcagatggtactcagaaaaatgtgcttccttcccaatgaacttgtctaacacacttgttagtgcgagcacacacacacacacacacacacacacacacacacacacacacacgcacacaaatcaccctcaggagctaatttactttgaaagaaacaaaagcccaatttaatataatagtactttaaaagtattacttaccaagtcttacaactactttttttccttaatagttagcctctccatatgagctcaattttcataaatcgagaggcttgtgatttgggccttgaaaaatgggtggcacccagtctgaaagccaggagctaagaaagcccacttggcagagaaatagcacaagtgagggcttcccactggggtcgtttcagacaactgcattatctggtgagctagagtgaggctgagcgggggaattggtgcaagacagaggcatttggacttcctgcaggtcacgaagcctcctaggatgctttcatcagaatggtgacaggaacagatgtgccttagacagcagactgtggcagcggtggggagggtaaatgagaggtgggatgagggcaagagagacagaaagcaagtccagtcagagcgatcgattccagaggagagataatgagggcctgtactggaggactggcagcgtcgatggcaagatgccagaaggctctggggacattaaagggtagagctgacaggagtttgtgactgattagatgggggcgggtagtaagagaaggaataagaggtgattataagctcctaccttggaaaactaggcagacaccaatggcatttagaaatgacaggcaataagaaactgctttcttctccttctcacagcggccactacggacacggttcaaaggactcgactgtcctcagctcccacttgacaaactcttgtataactcaattcaacaaccctgggagtgagtagaacaccccactagctcaatgatgttggttgctcctgtccatctttgcttgagtctgtgaaacccccggaaaataacagcagtaagaaatagtccaagtccctacagagctcatagcctagctggcatagtcacacactgaaactacagtacaaggtggcctgcactgtaaaaccaaagtgccgtaccagagaaagctttgcaaaggtcacccttaaatgaaacatggactagtgagacacacaagaagggcatttaaccgcaggaacagcagatgttttagaagcatgaagaggtgataaaatttagtaaggtgtttgagatgagtcagagggagcagaacaggaatgaactgaccataaaaggccgtgtgaagagcactggcttgcttacttggcacagcgctcgcctagcattcacaaagccctgggttcatcaccactaggcataaccctggcatgtgtcatatatttataatcccagcactcaaaaggtagagaggcaggaggaccaggaggcaggagggccaacttagtcaacatgagactgcctcagaaagtgttttttagaggtcgtgtttgcaggactggagagatggctcagcagttaagagcactggctgctcttccagaggacccaagttcaattcccagcacccttatggcaacttgtaactaactgtctacaactccagttccaggggatctgacaccttcacagcaatgcacataaaaataaagttaaatatattttaaaaggtcacgtctactttttaaaggtgttgtcttagatagggtttctattgctgtgaagatgccatgattatgtcaactcttacaaaggaaacatttcattgtggtgcctcgctcacagtttcagaggtttagtccattatcatcacagccagaagcaaggcagcaagcaggcagacatggtgctggagctgagagctcttaaatcttgatccaaaggcagcaggaagttgaagtgaaccactaagtgtgacttgagcatatataagacctcaaagcccacctccacagtgacacacttcctcaaacaaggccacaccgcctagtagtgccgctcctttatgagcttacgggggccaattacatccaaactaatacaggtatgtgtaatccttgagtgcctttaagcagaaagggctttttgtttgtttgtttgtttgtttgagccactggtatttatccagtattgaaggaaagcagataacatctcactacctgtctatcccaggttctataccagcctcatccagaccaacgtgggtgaactgtgtatgtattttatcccagccatggaactgtgagctccagtcatctttccatcagtcgcctctgtcttaaaggcagatctgttattttcaccatctttactccctgagcctatgtgaatacaaacccgaaattggcacctactgtccactgtatgaatgatcgatcactcaacagtttctttcctgcacttccagccttctagaacccagtggatcatcttctgttcaccgtagagaatgttcaccagaggaaggagtggtaaaagtcccagaggatcgtggctctagtcctaccaaatgtactgtcttggacattgaacaaatcatacatacttttagaaatttattacttcatttgtttgggagggcatctatgctgcagtgcgtgtgtggaggtcagagggcagctttcacaagtcagttctctttgtagtgtgtgggtcctgaggatcaaactctggtcaaatgaatgatatttactacacaaatgaaaatttcctctgccatcagccatcttcatgtagcattaagagaaacttgcaaagtaattttaaaaaataaagagctagaatcagaagtgctggggtccaactctggccttacattaaccagttctttacttttagaaagtctcttttttctgagtagaaatttttaatctgtaaaataaacataggaacatcctctacccaagtccctgcccaccctcattttaaaaaccacagtatttttatggaacttaaaggggtttcacataacattttattagtagaatacatttctaatggtactggtaactcttcaaaagcagactatttgactcattattaccacatttgacacatggccaggatctataaataactgccaaaagaatggcaagcaaagaaggttaaatttttcttttgtggaatgaactgaacttcaaatagtcacgctccaaattattttaaatagtcactgtaagtgccatttcattttagatagcagacatagcaattagcggagtgtctgcacagctagaaacattaccatttagtctggcttttattcaggataatgaatatgaatgcgttttgactaaatgagtggttctgccagaacaacgctgaatacacgttcaagctattgtgatgcttctgaccctgggagaagacgtgtgctgcttccatctacagaacactgcttttgaatgacccccccacacagacacacctaccataaaccacacacacacacacacacacacacacacacacacacaccacacacacctaccataaaccacaccacacacacacacacacaccacacaccacacacacacacacacacacacacacacacaccacatacacacacacacaccacacacacacacaccacacacacactacatacaacacacacacacacacacacaccacacacacacacacacacacacataccacacacacacacacacacacacacacacacctaccgtaagccacacacacacacacacacataccataaaccatacacacacacacacacacacacacacacacacacacacacacacacacaaacctgccataaaaaccagctataccacgcccaggtacactcaaattatataaatgaaatcatgggaccaggcaatgatggggcatgcctttaatctcagcactcgggaggcagaggcaggtggatctctgtgagttcgagactagcctggtctacaagagctagttccaggacagcctccaaagccacagagaaaccctgtctctaaaaacaaaacaaaaaaagaaaagaaaaatgaaaccatggcatttgcaagaaaaggatagaactgcaaattgttttctctaatgcagatcctagattttaattattatgtatgtgagtgggggaacaggtcatgaaaaaggaaggggaccataatggaggggagaagcttaaagtaaggtcctgagggggcaaaggaggcagtagtaatgggacatggggctcagtgtttgggaagcagaggcaggtgatctctgggggttcaagaacagcctggtctacatagtgagtcccaggacagccagaactacataatgagatacaaaataaagatacaaaaaaaaattaaaaaaataaaaataaaataaaaagaaatgtaacatgaagggctgggggggcagagaccagcagcagagggtgggagagaaagacccacaaaagagtatgaaaatagcataatgaaattcatttctttgattacatttaagggttaacaaaaagcaaatgcctgcaaagcttcaggctgcatggatctcctttgggactctaggataaaccattgctctcagcccaccagctaacgtgtgcatacatacgtatacatataatccctagtcaatcatttttcttgctaatgtcataacttttttgctgctaaataaaactgaggttgtgtgtcccatattttctttactcactagccatacttatataattgtaaattgtacagcaataaacataaatgaacaagtatctctgtggaagaacttaaatttgactctggactggtccacatggtagctgttttttgttgttgctttttttttttttttttttttgagaaaccaccagattctcacagcaaactggctacactggcttactcttgcccacagtttatatcctcacctgggttcattttctcaacttcagccattctgactagagtgaggacaaacttggagagtagttttaacttgcatttccctttaagtgtttattgtcaggttgcttcagttctttagtccatttactgacttgaagattgagtattttttagtgtttttcttctctacatatttgccttcagtatttatttagtagtagcttgttctatgccagaagaacattgggtatattaatctattaatttaactgttttttttttttttcaagacagggccttgctatgtaactctggttgtcctggaactatctaaaccaggctagcctcgctggagggatagctcagccattaaaggctaggctcacaaccaaagatataagagatctgccagcctgccttccaagtgctgggacttccaagtgcaccgctaagcccagcttaatttaactcttaacaagcaattctcttgattatatcttcatcaccattttagatatgtaaaacaatgtatctagatgtgaagatactgtgttcaagatctaaacctaagctgcatgatccgggctctcttagtcagcctaggacacttttctaactcctgaatgttcgttcttttaactatacaaattcacattgtgtagttatcctgacccacaggacagcaacctagagcaacaagtccagggaggggaatggggacaagagactcaagagaatgaccacaagacaggattctgatcaagtggcaaatcttatttttttccaggctagcttatatagtcagtagtatggggtaaaggggagggggaaaagaggccaagagccaggtgttagttcaagcaggatgttagaaaactataggaggatgttggcagggtaaaaagttcatgggtggtagggtgagggagggttgcttaggtaagtaggcctatggttggaacaaaggattgacgtctggatcatgttgttctttttgggtgctcatgcttctagaagccatttataatcaaaggacagttctataaccctgtggcttgcccagtttggcctaaaggttcatgccaagctgtatgtctcacaacaacattgcaaagtacaatgtgacttgtcctcactctagtcagaatgactaaagaaaatcaacccaggtaaggatgaaagccgctaatgagtgtaaactggagcagctactaggggagtcagtatggtggtttttaaaagaagggagagaacagaacaacagaaatgggctagaggtggcctggtggttaagagcacttgcttttcttccagaggacatgggttcatttcccatcaccttacaaccatttgtaactccattcccagaggacccaacatgttcttctggactctggggagcaccaaacacacacatggtagacgtacatgtttgcaaaatactcatacacacaaaacaaacagttaaacacacacacacacacacacacacacacacacacagagagagagagagagagagagagagagagagagagagagattgatttggtagagctgaagaactacctttacacaaatacaaatacacatcaggaaggtcaaactgattggcaaaacacctgccacagttaagtgttgggtcccatttattttgcagaaatcatcagctgggtctgttcactctgaaaatctaaaacagtgaaaagggcatgttacttcaatcggaagaagtcacttaaaattctagttctgtcatttactaccaagtcatttaatctttaaaacactttgctcatctataaaacaaatccatctaagtacaaacaccaaatctgaagtgttgctataaaaattaagctgtggcagagtaataccctaaattgattaaccatgaaaaaccatcatgatacaaaaatcaattaagcaactattgtcactgagtaaggaaagagtggatattaagattcccaagatgtatttcctctatctctgaagtttcccataaaacacaaggatgttaaatttgttttctagtcaagcagtggtggtgtaagcctttaatcccagcactctggagacaggcaggcagatctctgagtttgaggccagtctggctggtatacagagtgagttccaggacaacacagagaaaccctgtggtgttacttaattgccaattctgtttttgacaaggaacagtaatggttatatggttaacatttaaagggagaaaaaagccaagtatggtgacatttacttagaatcccagtgctgtcaaaacagggacaggcagatccttagggcttgctgaccatcaacctagccaacatggccagctccaaaaaataaaaatacaataaagtggatggtgcttagagaatgatacccaaggctgatgcacacttgcacgcatacatacatatacacacacatggctgatgcatacacacacatggctgatgcacacttgcacacacacacacacacacacacacacacacacacacacacacacacacacacacgtaataataaagcatgagggaagtaacaagagatttcatttaaagaccacaagtagaatttttcatatttttcttttctccccataactcacaccacagattgcaagagagtcggtaatataacaccagatgttaaaaatatatatatatatattcagccataaattaactaaaggacaagttttatacaacttatgaaacatcattacatcacatatgaaatccagatggtgagacgtctgtaactacgatctatagtttaagaatccttttgctgagctggccagtagtggatgattatcacagcttttcccgaagaaactaatccaaacaaccagcacacctgctagtcccagtacttgggaggtagagtcaagaggtgttcaaggtcaagcctctgttacatagcaactttgatgaggccagcctgggctacacagagacctatctcctacagcaacaacaacaaaaaaaaaccaaaaaaacaaaaaacaacaacaacaaaaaaaacaataatgactctaatccaaggaatttaactttcggcttctagggacattttggagacaccaaaaaagcagttagagaagaaaacacaaagtactctgtttagaatacaacctatctggagaaacattcttaaaatagtaactactgcttgtctgttaatcagtctatcaatcttacagggagatgctacagcatggatctgaacactcctcacagaagcccatgtgttaagcctgtggcactactgggaagccatggcaacttcaggtcatgccctgtgggagactttaaggcatcaggggtggcccctcaaagggaactggaaaaacccttgtctcttcctctccatcttctgcatccacaatgaggtgaataatttgtgttagcatgtgctcccagccacagtattcgacctcattacaggcctgaagcaacagggtcaaccaatcttaaactgaaacttccaaatccatggccccaaataaaccttttctctctacaagttgattcacatgaggcatttgctaccgtgacataaagataaggcaggtagtgttaagaacaagaggattatgcagaaaataagccaaagagccacacaattttaaggtattattcaagagctagtaaggaaacaacaggtatcaccaacgaaaagaagccaatgccaccaacagttcagtgtgaagaggtacctgctgccaagcctggcagcacaagtttgatcccagggccagcttagtggaaagaggaaagctgactgctcaagttttcctctgatgtcacagatgtatctgacctccacacacaggccatgatacttgtacctcttccccaaataaaaattttaaaagctgcaaagcaaaagtaaaacctaagagaccaaacgaagtcatttctctacttattaaatgttttgcaacagggagctagatagttggctcagtggttaagagcactggctgctcttccagaggactcaggtttgattcccagcacccacacggtggctcatcacaatctgtgactctacttctaggaaattcaatgccctcttctgggcactctgggcactaggaacacatatggtgcagagacatccatgcaaaacacccatgcacataaaacaagtaataaaaatgttttgcagcagataaactgaaaactattttctgcatctcttaagaaacacttgcatttctttgataaggatttctgagccagtcacagtagcacaggactgtgatctcagctcttgagaggtagagacatgaggatcaggagttccaggttatcttgggctatgaagtaaacctgaggccagcctggactaagattgtctaacaacaaaagaagtcaggcctatacaaacacacttagtatactttcctccctcaaattttcactataaaaattcacttggagttggatacatagctcagtggcagagcacgtgtccagaatgcttgaggcccaggtttcaatacccacaataattttaaaggttcatgtgaggtaattggaaagccactacttaaacagccttaaacaatgagctgttaagttacaagctagtgaggaatatggaacttgatgttttagcgaaagtcactgttttctacaactgactgcttttcttacacagtcacagaaaagccacctagtcttcttgctaaggccaaatcccaaaaggaacccagcaaagaaaagccatcagtaatagaacttttaattgtgaccagcctataaatattttaaggcttttaaagcttgccttaacatttaaaaacaacaacaaaaaactacttttctggagcaatatttgtttttaggaatttgttgtttttgactctagaaaaacaatttactagtttttaaaatcatgatcacaaaaatcatattcatctattgctagatctttgaatgtttggaagcctcaagctagatgggctctagcttttctatatattttaggatgcctatttatagagttgagggagtatcttccccccaaagtgataagtaaaacctttgcccaccaaagcctcatttctgcaacacctcacatccgctgcaaccactgcatctagaccagtgaggcctaaggatgcacttacacttcccagcaatcttccttccttcccactgaggcattttcaaagtgtaggatgtaagctgggagatgcctcatcaacaatgtacaatttaagtgacaaaaccagtatagagtaaaccgagttttacccaaaactttaagttttatcacctaaattctactacttttacaatagacaacactcagcttaaattctagatgaaaatctttttagataatagaaaatataagcatataaatggaataatgttcaatttcttttcttaaaaaactcagctctaaagatggatgagtttaaatttaactttttgtataaaacgaaaatcagtggtagtaaggctgaaaaactaaattacaaaacaaatacatgatcaccattcaaattctttggattgtttatcactaagccccgacacttaatacaaaaatgtaaaattttccttttatatgtgaacatgttgtactttaggaactctgtaaattctcacagctgtcagaattgcagaaagacaaggtgagggcggaaggtacaatggcggtacactgtaacaggaacaaacactgctaggaaacatgtctgtttctctgttgtacaaaaacattttagcatcttctagtttcatcggctcttcaactgtcaaacaagaaacctttacttctcatcaaacgaatgagtcctaagactttctaaaggatggacctcgattattgggtcccctttacatttaaggccaacactggttttaatttctattggaacaagggaacttttcaccagagtccttagaatgttcagggaggaaaatctcccccaaagcttttcacgtccattccgaagaatcagaatgtgatagaagttgcaggagatccagaacacacgctagtcatatttgatcctctctattaggtgccggtcctccttgtaatgggagataatctgaatcagtatggaacagttgatcagaagaaagaacaaaccagctaaccaaataaacaggaaggtgttctttccttgaaactctagaacgtacgcaggagtcagccataaggcctgccctatgaaccacaacatcaagagaactatggcccttttccaaggcattctcactagtggcatcaccagtggcagaaggcagaggtaccaaaggaagtactgagaggtgcaaactttgttaaaagtcacaaaaatggacgtgtgaaggaaacagcaaaagacaagatctctgtagtaggcaaaagacacggcagaaagcaagatgaactgtggcaggaatgcggcaagccccagggtgaaactccacttgctctcggcagtcaaatacagcatgtagaagtagggagagaagttgtggcggatatcccgcctggtcaggtgatagaagtaggtgtgctccagaaactcccaaccgtatttgtagtagaagccgaagctcagggcgaaaaacgtgagtcccgccacggctacgaagagcagcacggccccgctgcacagcctcttcaggaagtcgtacagacgggcctggaagcagtagcgggcttgccggaggctctcgtcgtcgtcgccgcgctcgggccgcaggtggagcgctatggggaggatgtaggtcaccgggtacatcttcatgtgcacggcgaacccgtagaagaccgcggcgcaggcgacgagccgcttctctatcaggtacagcgccgtcagcaccagggaggcgacgatggagtcggcgttgccccggctcgacacggccatgggcagggggttaagcagccagaagacgcagtagccgcaggcccggcggcgccccagccccctgagcagcagcaggcggtacaggaggaaggcggtgaggaggtcgcagctgatgaagaggaacttgccgaagagctcgctgaggtagacgttgggcgtgagcagccagctcagcagcggggtgtagcggtacgtggccctcaggtacggggagcgcccttccgagacgaagcgcgccgcgtccgtgaacacgtggtagtccacgtcggtgtaccgcaccagcagagtgcggtcctggaagacgccgtagaagaccagcgcgacccgggccaggaaggccacgccgaacacgccggccggcggcacccgcaggttcaggaaccattccccccagtgccggctgcagctcatggtctgaccccggctccgcgccgcgccccctcgcccgctcgcccgctctcgctcgctctctcccgctctaaccgtcctccagctccctccactcggccgccgcgagcatctcctccgctgggctgcaaacacaaacaaccggggaaggagcacttccggcaccaagtcccgccccccacgccacttcctgacggccccgcgccggttctctgttgtgtcctccccaccaccgcccccctcccccgcggaacaattacggtcctcgggattggctgtccagcttccggcggaggcgggatttccggtccctcgttgcccggaaagcacggagcggatgaggggttgtggagcggagtgagccgcgctcccaactcgggtcaagcgaggaggactctcggccctgagtgagctgtggcctgccggctgcaaccccccagaaccggcttgcagcactgggagtgagaaatgtagatggaaatgtagatggaaaggaaataaacctaaaatagctctgggttcctccttgcggaatacgtctatgtggtcacccccgagagccgtcagctccgttcttttcaagcatccttcacccactcgctttcacccctactaccattagttttttaattttttctttcttttttttttcccccaaggactccagttctttcgttctttatctggtgacttcctgcacttacttaaaatcgacttttaagaacttcatacttttagaatacttgcaattgcaacgaaattgtaggtttctcgaagagtacgaagtatacccttatttctttgtactttctcgtaatgtattacagtctcagacgcatggtaactgacacaggttgaccggcttggtcttacaaattgagcctgttcctagggaagtcttgtaagtatagccgtggctccactcagtctggacatgcatcctacacttcatgtgtatcctttgaaatagccatactaaccttctattctaatatttctattctttgatatgctttggtgtaagtatatgttgtggattagtaactacttctagtcaattttcaccatggactagccatattatgcagtgataacacgttgccattcaaataacaaccgctatgattcataatagttgtttgttaagggcttatttacaattgtcagacgcactaactactttttaatgtaagtagatactgttacctttaccaaggaggaaaatcagttcctgtagagtaaataagtcacacagccaatcagccaaataaaagcaggtccacctcacccaacataccttaatcgttgtgtgatgaacttgcaaataagatgctgatttggaattctgatttctctctgtgttttgtcttcttaatctcaccttgaaatctttctgatatcctctctcattgttactctttatatccctgcttgttattttcctttgcgagttataggtaagtgaggtttagcctcagtagagaatatgagagagatgcctgaagatttagtaagggttcttctgggtaggttgttttaggtattttgacagaaaagcctcagctaattatcctctgtggctggcctagtaaataggagagacactgtattcaggaagataaggaaataaaaatcaaaagcagcagcctgcccctggagtcaaatgagtgagaagcagaaaatagcaaaagtcttgaccaggtatcactccctgcctttagtgtcccaccctgtgaagtgttttccacagattttatattttaggatatgttaattatctattttattagtgtatagtgaatgcttcaggcttggttatgtttgttatgtaccactattcctcacaagtatgtaagacctgcagatttgggatctggttatttcatatatcttgtacatttaatatgtcttatgactcacttgcctatttattaatgatgaagggcccaatttccctctcccctttgtccttccatcttaaggaccaagaatcagtgaatataacctgttgcttcttgccagagtatttgggttggatattgactacgactttctcaggctcatgctaggtaagaatagatgaaaaatccattactttcagacttgggaacagaaatgcttcctgcttaaaatggacttccagacccttgacgatgtgtaagaaaagtcatccacaaagtgtttcctagtgtgaaaggaaaagaaaaatgaactccaacatcaccatctaaaagggacagtgtcccagatgcagaccaatttgactcctgcaatcagtaaagccagttttcagattcctgaatcttagtatttattaagtcttgccctttatgaactggatttttcaagctggtcaatggtggctcatgcttttaatcccagcatttgggaggcagagggcatgcagatctctgtgagtttgaagccagccttgtctacagagcgagttccagccaaagcaatacagagaaaccctgtctcaaaaaacacaaaaaacaaaaaacaaaaaaaaaaaagaaaaagaactggattttcaggctggagaaatggctcagtggttaagggcactaagtgctcctctagaggaccctggttcaattcccagaaaccacatagcaactcagaattgtctgtaatcctggttccaggggattcgtggcaccaggcatgcacataaaataaaataaatacttttttaaaaaaatgaactggatttgcaagccatggggggcaaaggtgcttgcggccaagcctgacaacctgagtttgattccccaggccccatatggtggaaggagagagctgactccagaaagttgttctctgatgtccacaagcccttgcacacctaaacacacaaaaataaataaaaggtttttttttaatttaaaacctgagcttgaaaattatttgttaaaggatattaataagggaaagagcaagaaaagggttggaaggattggggggatactattaatgaaatgtatgagtgtaagggaaagccagtaagaaaggctggcctcatgatcaggaggtctcccagcagagccaaactgagtccccctttcccataagtcagcctatgagtttgaagataacaagatagctttcggtttctgaaagaagatacggtgaaaacaagacattcatccagtttatttagtagtttcttctgaacagacaaaaataaaccaaaaatacctcacacatcttttttttttaaatacatttgacctggtttagtctttaatgcagtgcgtagaaaactcatccctatatacttctgcttcagtagcattggccagctagctgtacagtataggtaatgttattttgcaaaagaaataagttagctatcaggggtaaaggttcatgatagcagccatggagaaagtgcaatgtccctggccagtagctactttatgactgcttttcttcctctgctgacctcagggaaacccctgcatagttttactagctgaagggggtttcaggaagtgggcggggaggtagggagcagcaggaattaaggggaacacagcttaggggtttcagaaacctcccatagaattgtatcatcctctaggaaagatgaaaaccacattcttcatagaagagcctccaagccaaagcatcccatctgcctccctgccaggactggaacgatgaccctctctttgtacataagctcgggcctgtcttgggagtatcttgagctcaacagctcatcagtcctggcatttgtattctaccagtacggtttccacttaatgcatcccaaataccagcttgtcagattctcagtttttagttatggggcctagagctcctatcttggtgcaagaatgggaaatgcagagttgtgcttcaggagaggaaaaggatgcttttgtttgcttgcttgtttgttgccagcaataggtagaacatagtctgagcggtagattttcctagatgtccgtgacggagcatttcctctagctcttgtcctatcagcacaggctcatcagccttgatgagtcctttatttatgaaagggacagggtctatcaatcaaacttaaaaccatcagctactctcaccgctctgctgaacataacccagaaaatccaggtatcctactccataaaaccaaggcaagatatttgtccctttctaaagtctgagtacttcctttctgtacattccatatatttggatatatgtacatctatatacatatctctctatatattatctctgttttttccttagataaacatatatatcatatcccaatttcccaagtttccacccatctctcctgtgtcggccgtaagtaagactctgggtttcatttcactaggccccttaacctcgtctttctcattttcacactctagtacccttccccactgcttgttttgcccacctgaaatctcctaccccacttcagatcctcatctgttactctcctgacgtgacaagcctagagctggtgcagacagggaacccatttctcatcaggactggctgctagtaagcttgtcctatgtcctgaagtgggattccaggtgaggcaagccaggcttccatccgaagaaccccttgggattgggagtgggagttgctccatgcagaacactgggcttctgggagaagggtgccattctgaaataacaggacggaatgattttaaagtgcaacttagaagaaagcctgggattgtagaggaagttcaaaaagagttaaggcagaaaatgttctcttctcccattgttatgcaagaatctgaggagcattgggccttaggcaagggactgggaagagagtaattccttcaggagggaagcagcaatgtgcagaagaaaccagacaggggaacaattgccagtggataagaagatacacacagcaggacacgaagtccctgcactccgaaagccactgggaaggcacagatttgagtatatttgaaagcacaggcactggctctttgcctggagctctatttcagacgttcaggttcttctggttcctgttttgattcgagttgaaggataatggtgagttttacagtaaggaggggttgaatgctctttgttttcaagctgcagttaattgagttcgagggaaggaccaatgtaagggaccgtgcatggttgagatggacaggctcagccgcagggtcttctggtttctctgcaggactttgcacagagatgtgtgtatacattctgaataaacgtgtagtttgtcatcatttgtcaagtccaccttaaatcaacaattatgtcatcactgctggagttcctgccaaaccatcttatggggtttcctgtgtacctaagtggaaccagaactcacttgtgctttggactttaaaaccagacctcgtgcttacaatgccctttcctgacccctgccatgctcctcaccagagaagtaggaatggcctgagtctgatcctaggttgtctttttcgctagcctgagactggcccattggcagcagagtgtagagatgacactgactttcatcattttatgccatgtcagaatggctgagatcagaacatcagttcctcccctctcagcattgcctcatgaaatggctggcacgtttctgaagggcaccaggagatgtgacagaatagtggctgtcagcccgagttctgcttcggtccaaaccctaacaaaacatcacaaattcccagaggttctgataacaatctggaaatcagagaagctggttcaactttcctggggaatcggtaccctgtgactagttctacctgattgatgttaagaaagggaagtgactgtgtttccctctctttcttcaaaagcttcggttaagggctgaggggtctggggtgggtaggggaggaagaggaggagtcaggtacagtgtaatctggagtggtttcagatattttcatggggcctgagcactggatttagagagcattggcagcagggcatggtggagcacacttttaatcccagcactcgggaggcagaggcaggctgatatccttgagtttgaggccagcttggtccgcagagtgagttcaaggacagccagagctatatagtgaggccctgtctcaaaaaaaatgtttttaaagggggggagagagagaaagagagagagacagacagacagacggacagacacacacacagagagacagatagacagagatggagagagacagagacagagacagagagacagagagagagagagagagcgctaatgtcttcccattcacaggacacagtaaaagaaatctttccaggacagggccagactattagagaatagttccaaaattgaatttctcagaacccaggatggatgcaggaggggtggtgactgttcctgtttctcaggtcagcccctgttctatgggaacagaggctgagagagaactgggaatcccgagaagatccacttgagaacaggaaaggaaaagtaaggtggtgagccaaagtctgtgttatgtcaggagttaccagctgagattatatacaccatgacaaaccctggcttctttcttcgggatttggtagacagcccagggaaaactgatttctgattctttatttctgagagcatagtccatagggtgactctctgagagagttttgctttaggggactcaccagatggaaacagagatggaggaagctccagtctcgagtcatcacactttctagtagtgggtagttgggggggagtctatccatccaatcacatggtcctcctaatgtgaatctccaagcatggctgaggccttccaagccatttcagcctaatcttccctctccttcccccatcctggcttaagagtcgtgtacagtggcatagtagtagaggaaggtgcaaggggacagtgagaggaaacataggactccagatggcctggactactgacaggccaccggcttaaggaaggggaagtagaggatgggtgcttctggggttctccagcgaacccagaaagtctcctcttcccggggcactgaaagcggagaaggccaaagggctggggaggagaagacaggaagtcagacattgctgatgcgcacactaagggcactgccttccttctcagcttgttctcttaatgattcttccaacttgagcttttctgggtctccgtagcgtacagtgctatcacggagaccaccagggggagccaccttcacaacttggtcaaacaggctgaagtcagccacgtatttgccactggctgacagtgagatagcaggtgtgaattcatagccccagaggatctcctctggaaggtaggaagtgcgaacttgacaggtggcgctggtggactccaccgtcccacttaggatcagcaccagctcgaaatccccctccccactgcggagggggagatctctcaagggacttgtctcatctaccacgtggtagaaggtcaggggtaggatgagaaaggggctatcggaggccgtgtctacttggaaagtcacattgacctggttgaggcgaatattctcgccctcctttgtctggtgggtctgaagcagtttgcccgtcacctggcatccaatgaggagactcttacgcatattggcaactcggatcataaggcaaggcttgccgttgtgggaggctacaacagcatgctggctgaaacggatagtctcagccctcttcttgggccgggcaatctttgccaggaaggtacctgtaatgaagatctcgaggatggtggtgagcaccagctgcgcaataaggagcacgatggccagggggcactcctcactgatgtaacggaagccatagccaatggtggtctgggattccagggagaagaggaaggctccagtgagtgtgtgcacctgcacgacacaaggggtgtggttggcagggggccccagctccagcaggtccccatgggccacagctaccaggtaccacaccacaccaaagaggaaccaggtgcctgcaaaggttgccgaaaagagcagaagcttgtagcgccattgcatgtcaatgaaggtcgtccataggtccttgaggtagaggaaacgcttgtcagcaatgtgctccattcgcacgttgctgcgaccatctttcgtgaggaccctcctccggcggattcctggggccaccaggggccggctttctgtctgagtcgtctgactgtagtagaccttagcaactgaagtcatctacagggagcaaaacagcataaaggaggttactgtccaaatccagccaactcctagcaccacccaatgggaagacacactaagatttccttttaaaatctcttatatttatttatggcatgtgtatgtgtgtgtatgggggggtgcttaagtgtcactgcccaaggacaattttcaggattttgttttctctcaccatgtgggccctggtcaagcttggtggcaaatgcctttacctgctgagtcagagtcatcttgtcagcccctaaccttcattttgatgccatttatcctagcaaatatttgtagagcccttgttaaatgttagccacagcctgaggtgctggtaggtcaaagatgaaagtggcatcattcttgctaagaagtcacagtttagtgaggacatgaactaaatgcataattgcaatacagtgtaataatgttttgatttggggaagaggtgagacacagaaggatgagtaggacttgcacaggtccctgaaagtaggaatgagagctctcctgatctccattgaacacacatacatgcgtgcacacacacacacacacacacacacacacacacacacacacacgtgcttgacagagccactcctgtggagttacctagtttaaagtaaaacccctcctctctgatgaatatcaaggcaaaaaaactattccactgaagtccttttaggacagtcctgcttaagatgtatctatacctttaatttctctattctctcccttagccccgagttaaagcccactggtgagaaaatagcagaaggtgcccatccttctaccagtcaagcatccagtctccttcattggccgccattttcatcatcatttgtttgcactacctgggagaagttaagtctgggtcagggtctagactggcgtgaggaagagcagagacaagatctgagcaagagcaagagcaataagcagcaaggaagcaacaggctgacgcttcctgccagcacggagccatctccccacgggttggcagcgatgccaggttgtaggcagcaaaactgtcttgactgagtgaagtgagggtggacgccacgtctgcacgagctcaaactcaaggttgctattcgtcctgacagtagaaactgggacaaggcattgaaataggagacaattcacctaatacaaggcgcctggcatctcctcccaaaaagtaacttggtacttttccagtagagaagatttgaatcactgagactctgagtctgatgcctgaactcctgagaaggatgaagatgatttctgggatttggggctctttggagatcagagccaccattgcgttccctaccccgtatgtctgagtcattgcatttcatcattgttatttatcaagctccctcattttccccattgctttgcctctggaagagtcgaagttatacgatcctgtccatgtactcccatccactgatcctggagatcaccaatggatgagggtcctgagaacattcagaagcagcagcctgcccattttaccagcctggagaccgtttgaaactctcatccacaggagactgctactcagccagacccagtactcttcaccgccctatggccttgattcccttgaagctaaaaggaagcactatagctctgaataattcctatttagaacttaaataaagccctgctcaatactcagaaatgctaataacaataaccacctaccacaatccatatatatacatatacaacccatatatacacatatatatatatacatatatatatatatatacatatatatatatatatatatcacaccagcactgtagagactacacataaaaatgaatgctcaaaccctcttttttttttcttggttttttgagacagggattctctgtgtaacggtcctggctgtcctgcctggctgtcctggaactcactctatagaccaggctggccttgaactctcagagatccacctgcctctacctcccaagtactgggattaaagatgtgcaccaccactgcctggatgtgaagcctatactgagattttgaggactgttggaggaacaaagggattgcacagttaggtatgagagaaaataactttaattttcaaaaagaaaaatgaaatctatttcataagctatagacaaatgggtgatactgatcctaggaaagattcttcaataaaatacaaggattgtaaatagacagaacaagagagcaggaagttgtcagcaagactcactgtgcatttactgagaacaagtcacatcaaaataacttaatttccttctacgatgaggctactaaattgtcaagtcaacaaaatacagataatgtataactaaagcttcagggagttttttgacaaaatctatcatatctttgggaataagatagacaaaaatgactagaagagccatgtaattaggtggctttaaaaattcagtagtatgcatgattagagcccagtagcctagaattcatttccaattgatgtagcggagagatttatccttgatcttgccctagtcagtgctcttaacactaatttcattcaaaactagagaacattgtggccatcagttgtgtggttgacacaaacctgcaatgctttacaaggactgggcagaaatgggatctaaaaagaaccagatgagtgagccaaatctaacaaaaaggataaacattatacactggggcctaaaaattatctgggaaaattaaagattatgaggatgtaatttagtcgcattaccttggggggggagagatttaaacattttagcaaaaaaaaaaaatccagcatgagttgttcatgccaaaaagtaatacaatcttaagctagtttggttgaatggagtctctagaacaaggaggtaattgattccactctgcttggttcattccacatcttcagtattccatctcaagcagcaatcaagagatgaaaaaattcggggccagatcacatgagaagcgattagaggaaacagactaatttgtcaagagaagagatggtctgaaagaaagaacagatatgtatgagatgcttggcttgagggactatcacatgaaccaaggttcagattagtttttcaagctccaagaacaaaaaagatcggtgagttcaaactatagagaggaagactccagctttattgacataacaaaacactataaacaggattgtccagatgtgaagagtccctaggaaggtacagaacatgctgtccctggatgtccaaggatgagttatacagagttttcagagaccctacagaggagatgaaagctctggcgagatgtctatttgagcttccggccacacctatgggagcatcaagaatgccccctccatcgcctcaccactcttttcctgaactttctgtggtgccaatcagggatcattcatcttagccttccctttgtgttacaaggaggtgccatgtatccggaaggatagagactctcaaaaacatgacttatcattctccaaacaataacctatgttacttgttattttataaaatacataatttgatccccacactatgaggtaggtaggaaagacatcattagaaactaaggatcagagaaaaccacttcgaacaaattagtggtaaaatgggaagccaaaccctggtccctggttcctggtccaaaacacctggtaccctctactgaggagttttgcgaacacagagaagacagagcctggagctttgaaatccgggttttaaggctgtagattcatgagtcctagagattttagctacccactagctttttttgttgcctctggctgttgtgtttgccgcctccaactgttgtgtctgtggtcccagcctttgtaactgccacctccagcttctatctgaagttcccagctgttatgccacctcctacagccaagccactttgttctcaggggtggccagacagataaacaatcagcacactccacccccaagctggccaggcctctgggggaagaaagccagccaaggttctggaagtggtttgttgcttgctatcttaccaaaaaacgtacaccctgtttcctctagagggtgcagtttctccaaaacagtcccaaccacgccctgggattggcattctaaagagcagcctgaatcgagagacagaacctggctatctaccacctttcttctctgagaagtgagctgattctttccctaaagcaaaggtcagccctaaggacggtgatgctcattcctccagcaaataccatgcctatctttggtttcacgctctcagctcccctagagctagatttcctaacctacaagcacttttattttatgccagccactcatgcttcagaatgaatggatttatcaacacctttctcaggtacttgattgctcacaagacaagacatagctcttgtggctaaaactggcaaaggtcccccattgtttttaggataaactgcaagcctctggtatggcattcaaggtcctccacgaattagcttctgcttacttctttctcttttttcttttttcttttttgttgtttgtttgtttgtttcaagacatgggttctctggaactctctctgtagcccaggctggccttgaagagatctgcctgcctctgcctccccggtgctgggactaaagacctggcttctgcttacttcttggccttaccctgacagtcttcccacatccttagacttcagctgtgcaggaagccccactgtctgattgattctttctacctttggatctgcctttgtactgctcaacttcctggctgtcggatgacttcctgcctacctccaaagcttggaccaagtgttaatgatgcctttggaagccttcctcaacctcagaggaatagattttttttttttaatccctaccccatctcactctgacatgagttttctaagcacactcttgcctgaatccggcttcataacaccagagtgctttgaaatgtttatttgcctttgtttgccatctgtgaactcttaattgaaggccatggactatgccggcatctgttccaccagaaacagggcgtttttaagcctgaggaagagactactgaaggcactgtgtggagaggtctgagtgaggctgccgccttgatgcacctcacaggggatgacctcctgaagaccttcaggaggagatgtggcagggaagaggagatccaagttcattcaggcatgactaatgctacagatctttgtttgcagatctttccagaaggggacggaaagactgctcagagacttcaatgccaacccttctgtgggtcagctgattttttttaaagtatgagcttggtaaaagagtgggctttaaaaattgctggaggtggagtatgggaaggaagttaagttagtcgagggcttgcatagcatgccctgggtttgatccccaatagcgcataaagcagtaatgatggcacagctgtaatgcaatgctcaggaggtcaagaggttcaaggttatccttggctgtatagcaagtctaaggccagtctgggctacataaaactctatctcaaaaattaattaagttgattgtcactgaagtttattatgctatattgggtggtgagaaagggtgcttcaactccacaccagggacagcaggtggaagagcagagggtaaactgtaccatttcctgagacctatcatgtggggtggggggagcagtcctttcaaccccaaagaaagagcttctctgtagtgaaagctactcagctggaaggggctttgggatgtgaatactgaactcattcatttccaaatgtagacaatttctcatttttctccaacctgtccctctcttccggtccctaaatcactaaaggtgccatcattctccagctactcacattcaaaatcctggaaccactttcaacttcccttccccctcattcaccccgcaatgctccatgttgtgggtatatccctttcctcgtgctgcttccctcgtttcactatcagccttcagggactcagcgagtcactgcgccatctactcttcatctcatgcctccgtttttctgtaaccaaactcatccaacactgctgccgggttactcttagttacatgagtcaatgaacactgatctggtattttccaaagcgcacgcagatttcaggtaaagaacgtggcattcctggtaaagaccagagtcctgcgggtgaggatacatacatacatacatacatacatacatacatacatacatacataccatagctaagagataaagtgcttgtctggcatacccaaagctctggatttgactcccaaaactgacaaaaaaaatcctagtccttattttgtagcaattaaggctcagcaagatggtgtgactccctaaatcatagaactggactcatgatcaagtcctctggctccaaacccacccgcttttcatcacactgtatctgcccagctccttccccagctcaaaggagaccagagagagaccagattgagtccagcacccgaagaattttgtgacctgtgtctagcccaccttccctgccttatttcctactgctcctctcctgtggcacattcaaacgaacacatgccttgctgttgaagcctgttgtgctcatacagactttcttacctttgcctattcttctgttttccagactacagagcctggttcagatggtccctgttccataaagccttccctgaaaaccacagcctattcctgagtttccatgtatatgtatctattgagttaaaaacgagcttattgaagggaaacacctagctctactatttcttgatgaattgagtcttatggtttagttaccaaatattctcccaggaaaactcatgtactgaaggccttggtccccactacgcagcagtgttcagaggtagagacctgaaatatgagtgatcagtcatgagcgttctaactcatcatggattaactggaagttaggaggagggacctagttagaaatagctcactgggcatgacctgaagggatatatcttaccccctccctaaccttcctctgtacgtccttgttttcctgaagtgagttttcctcttccataccctgctaccatgatgtttctgttatgcctctggcctaagagcaatagaggttaccacacagaccaaaatatctcaaagtacaactcaaattttcctcctttaaatcttgggtatcttgtcacagcaacacaaagctgactggcatatctaacagttatgtgatgcatagtgagtgctcaggaagtattttgtgagtaaattaatgaatagaagatagtggttgaatcctttctggctatcgagggcaatctaagacagtggttctcaacctgtgggtggcatatcagatatcctgaatatcaggtatttacactacgattcttatcagtagcaaaatcacagttatgaagtagcaacaaaataattttatggttggagatcagtacaacataaagaactgtgttaaagggtctccgcattaggaaggttgagaaccactgctctaagggtaagagaagatgctgccatcactgtagggctgaggagattcggaacctcttgttctatgacgaacaagtggaactctactctgccctagggctttgggacgttttcctcttcctgtcttgtttgtatggtctcttgatttttcttatgattcccccacccttatacacatggaaaccccagataactaattagtatcgctaacaaataaaagaaaaaaaccaaagtgtttccatctgcagtgcgttgctcaccacacgcagtgtgacttttgttttcatgcacttgcataataaatttctttttagtatctcctgggtaccagattctaaacaagaccctggaattaaagagatgcagcaggtataaattaatttccttgacaaccttagagcctaataagggaatcaaccataaaagaggcagggaccagtgatgcagggatcagtttgcatgaagggaaaggtgacatctagctcagtggatgaggggtgggaggtaactaatactgaccatctatcgtgtggtaggtatgggactgagcagcctatttttaatcgctggttaatatgatttccaagtcaccatagaaaactgtcattattgctatttgggccaggaaatgtagacagtaaccaggagttgaacttttcctgctgtacccaagtgtctcttttttggagaggatccaaagagaaaggtgactgggtttaaacagtgggcaaaatgggattggggttctgtaggaagaacccaaagaagtgcatgcagtcagaggagcacacagtcaggggcaggtgtataacagcactggggtcatcagagatggaatagcaaccactgcttttttaagctttgggagcacaggaaagagagaggtgaatagggctactccgctggctttccgtttcctaactgtgaatgcagtgtggcctcatgctctgggcaccatgccttcctccggtgacgggctgaattccctcttaaacaagagccacaacaaacctctctccccctaagttgtcccttgtcagctattcagtcacagcaacaaggtacgaaactaatacaagccggccgacagaatctgtgggcaggtcgccttcagataagatgccccttcaatacatgacctagacatgtgttcgtacatcacatgctggagatagagtgacacggttggacacaaggatgaggaaggtccagcctgggaacagagtacagttctgcctactgggaagtgcactggactgggaagcaggcaactgtcactctcaactctgccatagactctctgttaccctgaataagctcttaaccctctaggcctccagatcttccattgtggaagaagaaggctgtgtcaacgccttgctgccccaactctagcacacacctggctgcacccagagacaccgacagccacgggattcacctcagcatatgctctgtggatattgattataaaggttttaggaaaataatattttaatgttatataagcaaagtacggtggaataaaaatgaaacatttacattacttaaaaccaaaacagctttctaagatgcccagtgcatgggagctgcagctcatctgtggacacgttcctgtcctctgtcgttcagaacacactgctaggtcagtttggaggttcggtgctagaagggagaggcccctttctgctttaaaactccccgtctggtgggatggtggcacatgtctataatcctagcattccagagacgggggcaggaggaggatgaatttgaggtcagcctgggccatacagaaggaacctatctcgaaaacaagtaaaaccatctaacctggtccggtgccattcctcccattggagaaagggaacagctcctcggccgcctctcacagccatatcatctcccttttgaatgccaaatcccacttaaataatggtcttggaggcctcctggaggagagtggctgggcctgaaaagaagcatttctgggcttccgagtgttcttcgtgaaagagaggaagagaagagaaaagagaggggaagaagaggaagggcaatgacaaaaagctctgagggttatgtaaggcctggaggttagaagaatggacttggatgggagtctttttaaagctaatgtcattattcatcaatctctctcctgttctttcccccagtgaaaacaaacaaatggaaatggagccagacgcacacaaatctcgaggtgaggaaagggggccgtgtgtgtccaggagcctcccgtcccagctgagctgcttcccccgggccctcccatcctctagccccagcctgacaccaaggccctgggccagggaagaataggcttttcttccctgtgtcaacgtttggaaagttctcagagtttgatcagaaggaaggataaaagccttcaaagcatttcctgggagtccgtgacctccccctggcccttctgacccccctctgtgttttccagtcaagagtgggagggacaaagagatgggaccatgtcagacgttctcctgtgtttagacaccaccactgcctgtcagtgtgggctgagcaggaccgctggcccttccttcctccagcttgttccccagacatgccttctgacccccttcaggaaggggacagcattcctgcagagagctccagagggtggcatctcagggaacccatcgtccctggctggagtgggaagatgactccagggcacattgcttcctcgtgtacctgccttcccagactcccacaccacctccagcacacttcctccctgagctgtggtccagccacagtatctgctcttagctgttgtctggaactacagaactgcacatcctgagctcttcggtcaactggtcctttgtgaggacttggcactatgtagagttcaattgaggacagagctgtaccactgtctcctcatgagcttcggtgccaatggtccggagagcctccaaacctggccgcatgtgagccttcacctcagaacatttgcttagagatgttaactcatcctctttcactttgacggaagaaccagaaaattcaagtaatagtatgatttaacagaaaacaatgagtaggaaaaaccccattcccgccaccatacccctgcagagacaggaacttatatagtccaagctatccttgaactcataatgcagggaaagatgactcttgcctctatctcccaaatgccagggttacagttgtgcagcatcacacagtccatgcagtgtttgggggctgaagccaggcttcatgcatggtaggcaagcactatgccaactaaactactgccccagcctgcattttcttccagtaagacaggagacgctgaaacagttcccaaggacacggggcggggcgggggggggggacctgaaagctaggttgagttgggaagaaactggataataaacaacatatctgtttgggatctctcctttgcaggccacctctgccctagatctcaaatcagtcacagcctaatcttagacactgtaaagggattctaatccaacttctgcctaatgctattgattgaaataatcaaactcgtttagatagcaggcaaaccccatttcaggaaaatcacctccacccatctttgctgagcggggccgtctggcatgcctacagagagtacagagtacagagaaagagagaactacaaaaccacaaacttcaagcttcgaggtgacctgctgttctcctgtgctgcagatttaagtcctagccaccagggggcagggccctctagtctggcaggctgcccgcatagactctcccaacctctaccaatgcaccaatcccactccttttactattagtctggactacttgtaatcacaaattaaaaataaacagataacacatcgccaataccaagtggttcaataatactagcaattcaagtagcaatagcaaccatctctagagagcagaagttggccttcgaggaagcacctatacgaatttagaaccatccggtttgatgccccattgggcagcggctgaggcaactgggaattctctccaaggtcagaactgacattccacttgttaaatccgagggtgttttctcagttcttgaccccagcagactctcatttacactaacattggtccattcctggcatgctctttgtgttttgtttgtgtgatgaagactcgtgattttgtagagcttcttctaggctttaggattctgggcaactcacttgaggttctgggcttcgatgtcttttatctgtaaagagggcctaatgacatggaggtgatgggagagtgatataagatcatgtgtgtacgaactcttcacgtggagtgctaaggatgcagtggtttctctctgacatcacattcctaggctctctcgacctctgtttctaaaggcttgttacatttatgtatatgggtgctatagcacacatgtaaggatcagagggcaacttgtaagcatcagttctctctttccaccgtgtaggttcccaggtatcaaactcaggtcaccaggcttggcaacacgcccctacacccactgagccagctcacctgtcctctgtttacttttgatccgtctcttcagtgaggtcagcatttcccatgcacacacacacactcagtgaggtcagtatttcccatgcacacacacacactcagtgaggtcggcatttcccatgcacacacacacacactcagtgaggtcagtatttcccatgcacacacacacactcagtgaggtcagcatttcccatgcacacacacacactcagtgaggtcagtatttcccatgcacacacacacactcagtgaggtcagcatttcccatgcacacacacacactcagtgaggtcagcatttcccatgcacacacacacactcagtgaggtcagtatttcccatgcacacacacacactcagtgaggtcggcatttcccatgcacacacacacacactcagtgaggtcagtatttcccatgcacacacacacactcagtgaggtcagcatttcccatgcacacacacacactcagtgaggtcagtatttcccatgcacacacacacactcagtgaggtcggcatttcccatgcacgcacgcacacacacacacacacacacacacacacacacactcagtgaggtcagtatttcccatgcacacactcccatgcacacacacacacacacacacacacacacacacacacacactcagtgaggtcggtatttcccatgcacacacacacacacacactcagtgaggtcggtatttcccatgcacacacacacactcagtgaggttggcatttcccatgcacacacacacactcagtgaggtcagtatttcccatgcacacacacacactcagtgaggtcagtatttcccatgcacacacacacactcagtgaggtcagtatttcccatgcactcacacacacacacacacacacacacacacacactcagtgaggtcggcatttcccatgcacacacacacacacacacacacacacagtgaggtcggcatttcccatgcacacacacacactcagtgaggtcagtatttcccatgcacacacacacacacacacacacacacacacacacactcagtgaggtcagtatttcccatgcacacacacacacacacacacacacacacacacacacgcacacacactcagtgaggtcagtatttcccatgcacacacacacactcagtgaggtcagtatttcccatgcacacacacacacacacacacacacacacacacacactcagtgaggtaggcatttcccatgcacacacacacacacacacacacacagtgaggtcggcatttcccatgcacacacacacacacacacacacacacacacacactcagtgaggtcggcatttcccatgcacacacacacacacagtgaggtcggcatttccatgcacacacacacacacacacacacactcagtgaggtcggcattttccatgcacacacacacactcagtgaggccggcatttcccatgcacacacacacactcagtgaggtcagcatttcccatgcacacacacacacacacacacacacacacacacacacacacccctgactatcattcctaacaactcgaccctccctgtctccactgtttcagcccttgctatgcatcccacctggcctctgctttgtacgcccaagaacttacaggttcactctcctctggaatttcaaatgtacagacccgtgtcctcgcctcgagaatctcttgtgtggtttctcttgttcagagagaattatcatccattcagtacccaaactggatatctggcctctctcttgcccctcagcccattggtcaccgggtcttatccatcctgccttttcccgagtctgcccacattctctgaggcttccatcatgcagtctctttcacctgaaaggatgcaatgacttccgggtccctctacccccgcttcacatcctcactcccatccttcagctgccacagagccctgcagcccagtcagacccatcgctcagctcaggcttgagctttcatggcaaaaccacttgacatggcactaagaatccttcaccaccatcactctggaagctgcttcttggcctcctccccaccctgcacaccgcccccacctttgcttctgcagctctctccatggagtgtctcctctactcccaactccttccacacccctcttccctctaaaatcttttcatcccttgagaccccctccaatcccagtgttctctctgccatcgaggctgctccaggctcccaggtaggaatatgtagactccctctgtgctcctgggacattttgccatagctttttgagatcagagacttttatctcaagcatatttttaaactagtattgtcaaaattcacctaattgctcagcgtataaggacttaaatttgccatctcaggatggattctgggctacagatgtcaactatacggcctgtatgagccatcttcacacacacacacacacacacacacacacacacacacacacacacctgatatcactggttcataaaagttcattttctgttttctgactgagcctcagaatcttcttaccatagtctacagagaaccatttgaagtggcactagcctaacaaacgaaacctaattttttatctcagtgcctccatgttacagttcacttctctttctgttctcattgctactgtttgccattctggtctttgacagttactggttatgggaacctcagtcaatcttttaatccctgtgggctcagtttcctcatctaaggaggcaataaactttgattatgtgctcaggattataagagacaaagaaagttcgtgagatcttcaaggcccttatgcaaataaagatatcattattattgcactttgcagatgaaggaaaaattcccctgaattaaagaaactaagacttgcaaaggtgaggtgactgttgacatttacttaatagcaagccagaagtctctccaagtctcacaggatttttattcatattgcttctctgtaccccagagggcttgatgctgctcaagctgagccaagcttattactgctttccctagggcaactgcgattggtgcggtaggatttactatagcctcagaatttgaggggcttccaattcactgccctatcccaacctcccttattcctgttgaagcttcctgcaaacaatgctgaacagagctgagtcctccatggctgctctctgacccctcctctacatgcaacctcaggggctccaggaagctagcaggcctagacatccggccctcagaagactatattctggcccctgatctgtcaccagcatctagaacagtagagaggctctgagttgacaggacttctccttgggagttctgggatcccactcacacaggatccccgctttagaaaagagaaagagccacgccttcaatcctagcactccagaggcagaggcagatggatctctgtgggtttgaggccagcttggtctacacagtgagtaccaggacagccagaggtacatagcaagaccctgcctcaaaaagagagcagtaagaaagagaacaagacccctgttgaaggtgccttctctgcatttgctaatctgtcatcttgaagttatattgtctggtgattggtgagggcttgacctggttgatggagggcccaagaagcaaaaggagagacagaagagccactctctggtgtggaggcacctaggacagctccccaagggattgttttattgtgccccctccttgcactaagagacacccccatcttccccaaaaccagaagctcttctgaactgatttttaaatgtaatgtttagttttagtatatatatttttgcctgcacatacctgtgtacatcggagaccctggaactggaattagagacaattgtgatttgccatgtagagatgctggaaattgaaccctggtcctcgggaagaacagacagtgttcttaactgctgagtcatttctccggccccgaattgactcttaatctatatttttggttcatttttgcttcttcctcggtgcctggtatttatacttaaaggagtccataagggggcaatgagatggctcagtaggtggaggtgctatgcctttggcctctgggacctgcgtgatggaaggagagagccaactcccacgggtcatcatctgtcctccatgtatgtatgtccacacatccatgcacacgtggttagtatcccaaatattactattccctcccttgcagtgtgtatcatgctctatcccagcacgccctcccccttagattcctatagaatctctgggtgcttgggggacacggactcagtccccctctcctccccccagcctttactctggactgaaaagctggcctctatctagtgtcctggccctggctgcaggtcctccttagcctcacctccccagaattacccctgccctcagcctgagagtgggcatatggagaagtcgcgcctgcatgcagtcactactctgctcatcagggatgccttaatgccagttttccagaggaagtagatcattctttcctggttaggagacaatggcaagccctgacctaaaactgctgatgcttcatccgagatccaccaaggggtcctccaggcaggacagtgcccccaggacagtgtgaccaaggcaagaagacagtgtcttgagagaaagggagcgaggcaaggaaggaaagggctgaggagaagctgagggacttgtctctaaagctcccagaaggtcatcccctacagtctgacctttgctaaccccatatctccatccattagccataccaaacatcttttccttctggaacctttctttgcaaaagagggccacttccaatcccactttgctgtctcatttcttctctcccatcaggattcagcttggatgtatgtcactttctctagaaaacctttcagaaggcctccagaccctgtgtgggttgcaccctcatctgtgttcctgcagcattaccaacgggcccgtcccaacccttcccacatgctagtattttgcagattgctccatgtgctgtgatgtgtggaccgattctccccaggaggctggtgatagcactgccttcgtgttaatggcatggaaacagagttagctggttggctcatgctcaaggaagctgctaagagggctggcactgcaagcaaaacccagcctgtgcttgtcatcttgtcctgggtcacaggatgttggtgctgggaggtctccacacatatcccgctcagtcccctcaatgtattgaaaaaagaagacaccgcttagaaaagatgaacaacgtccccaagatcacacagcatcagagagtagccctggccttcatcccacctcctttcttcctgtaagatctgaccctgaggtcctgaagtcacagttggtttacacttgaaatagtatccatggagcttgttccctgtgctcacccagcctgggatgtgttttgtttgactctgtccatcagggcttagggccctcacctcctgcagcagccaaccctgctgtaagaagtgaaacagaaattagtgccatccctaaagagaataggggacacatttgatgatgctttctctgcagactgtaaaaatggaaagagagttctcctgagacatttagaaatcccactacccacaggggttctgaaagtcatttgaactattgcttaagccatccagcctttgttttgtaggtgactacatggacatcttcttaccagagacaaagactttctcccttttcttcctccttctgttcctagtaacacctaacacccaggaaattctttgtttaagacaaatgttacctgctgttcttaaatgatttttatttatttatcgatttttatttatttgttgtttgtttattgagacgtggtttctctgcatagtcctggctgtcctagaacttgttctagaccagggtggcctcaaactcacagaaattcacctgcctccaccccctgagtgcggggactaaaacgcctccttcaccactacctggcaagcaatttatccttattcacatccttgatggcattggaggcccctaggactctacctatgactcatactcggggaattgagccacctcctggacaggtcctcccagcaccatcagcttctcaaggctaccattctgtttcctgtagcccctgactctcagagaagtcccaggaggtcaaccttcaccgtggaggcagtctctctacttcttcctaactctcccccaatttctttaatcttcattccacttgagaaggagggggttggggtgagggtggcatgcagactccaaatagatacagagctgaatttggaggacggggtctcattgtgtcacaacccccaccccaaatgctccagtacatcaggagggcttgtgggcaggtttcttttaccaaaaagagacatttagagacagaagaacacaactagaagggatggatgaggtatagagaccggtgagtaaggtggtttaggctgaatccagtggccagggagaagcatctagataaggaatagaaggaggggagggatagaaggatcctgcagttcctttgggcagatcttacgtaagggaggcatcgtggggatcagtgttcagtaaccacttgcagcttgctctctgctagagctactgcagctgggacctcctccaccctcccaggacccagagcacctctgaagtcagctcaaccctgaagtccctggagtggcagagggcctttttttcttccccctttacagcatctactccaagctactggagagacgcccaagatcagaatgctagctgaggcacagccagtcagcacagttaaagatagagacatatgagtggggaaagacagggctgggtacccacaaagacttgtagccaacagcggtctgcagtgctaaacacagctgtgaagcgggggtgggggagtggggggtggggggaggcttactctctccagctctccagaggcagtagccggagtagggctggtgggggaagtgaaacggtaggtttcaccctgcagagtgaccttctgaaaccctttctatactcagaagcccagtgaaggtccctccacctgctgtttctctgttcccaactgttaccatgcccacagcttctttctgagaaaggtgagtaaagacaactatggtaaaattccataggagcaggggaccatctgagtagagccagaagtagccagtaccaaaactaaacacaacaaacaaacaaacaaacaaacaaaaaactagaagcaaggggccacctccaccccacccccaccctgcccttcaacccagtcttgtcgtcagctacctgggcacctcatctcgccatctcagtcttactgggaaaaggataattgtcctgtctacctctcagggcctcgagggcttgggatgtggggagaattatgggtaaatgcaaaggagagtccaccagggcctgcagcaggtcaggatatgttaaccatccacatgcatacatatagactgaatgcttgactcagggccagggtgggggtcctggtccaccgacctcactccacggctggagtagaggtaagaaagttgtactcaaagtctggcagaggctgtgtccatggttaacgtataagcaggtaaagtctggggcagcaggacgttccccgccccagggccacattcttgaggtcacaacaagtgcaaacttgttaaaacttgtgtcagagcagcagagggcagcgaggggcggggagggggtggtactgaggtgccagtagctgctggaggagggagggtgggaggggaaggagtggaacgaggaggtgtgcacgtgcctatgctgaccgaaggtggtgtgggcatgtggtctgtgagcacagctctgcatgttgtatcgggcacatctgcttgggtgtggggtgggagcgggtgtggggccgcatagatgagcgtgtgcctgtgtgtctccgcatatatgagccgtgtgtccatgcgctgggagaaggaagggctgggcagtcactcgtccaggctgggcacataggaggcatgaacaagctgtgtgtgcccctgtcctgtcctgggcctcacagacccgcattccaactccctccacagaccacccccacccctgcggtccaggctttgccctccacagtcagtcctgtcaaatgtccatctccccagactacccaaaggggggatgtcatactgcccacatactttccctcctcaccctgggtccactcccccatgctctctggacactggggcgggtgaggggtggtgggggaggctctgaaagcaggtgactgtttgggggaacttggggacagagcccccattgtgcccgccctagagccgcctcaatggagctctctgacacaaaggggctttgacaatgggacggacattagtatgcagagccagccccctggccctctcactgtcccacagcccaggggcgggagctggggagctgctggcagtgggagacagggtggggcacggctaagactgaggagattttagccctagcagctcccctgaggtcactgaccaagagccggggcaaggagattcaactagggcctccaaacctgccactgaccaaagaggacagtctaaacagggaaggccttggggacaggagctaggagaggggctgtgggtggtcagtctgagtcctcccacctcttacctccattttgctggggaggtaagggaatttgctgtgtagtcaagagaattttgtgggtaggactctgtgaacaccatcgtgagagagtaaggtcccaagccgaagctcagagccacagctggtggtggccctgtgccagaatggcaggcttcaggaacagaggggcctggacctctgaaattcaggatgctcagatttggggggggggtctctggtcttcttcttccttaactgttgccctcttattctgtgtggatgggtaggtggctgggtgttggaggccagaggttgatgtcatatgtcttctgctatagctttagtttttgagacaaggtctctcactgaacctggagcttgctatctcaaataggctggctgtccagcaaatgtcagggagctactgtctccaccaatgcacgcaacacccagattttacctgggtgatggagatctccccagtccagtgctgccctctcataagacctctgttggggcggctgtgatgacagagaaggtgaccaagaacaagggtcactgccctttgggctcttccagggaggttggtttgaacccacaaagtaatatcaactgccagctaaagggaattatccacatgaccagaaagccaggtgactcttcccaaggctgtgtacctgttcccaattcaagcccacccccaacacacatcagcagtttcccaaagtgacagttctcaagggctatcttaggggcccacaggggttcctgaggcgcttttagaagcttactgaggtcaaaatctatccttgtcatagtgctaatattgcattatttattcttccactttcattatttcaagggtgatcagtggagtttcccaagggtacatggtgtgtgatattgcaacatattaaatgcagaagcaaatagaaggaaccaactaatttttcctgagctagacattaaaaagatttgtgttaataaaaggcagtgtcactcatactaaacctttgttttataaacacagctattttcatttataacctcacatcaacaggcaatagggttatcataatttttaaattaattatggatagtcttacatctcctcagcattcatttataacacgctgcatatcaagaactataacccatgaaaataatgctctttggagccctcagaaaaatgtaaatgtaaagggatgctgagatttaaaaccaaattccctaaacagcctcagacactcaccttcgccttgtataagcttcccatgtttctttttaaataaaggatcagccagggtttaggcatggggtgaggtgtgcccgtgggtctcggggttaggactgggaagaggagagagctcaggggtttcctctagggagaatgtgacacacacccccttgagtggcatccccacatttctcgaattgcacacccctgctcagaaaggactcaagaccacaagactgtcccagactggaccctgacgtctagctctgtttctatcccagacactagctgatgagcccagcttgaggctggagtcagacttccctccaagggtccgtcagtgtttagggaacaggaaactggagtccaagaactttccccaccagatgaaatggctggttgagcttgaagctccctagacagttgggtaatggggtctcatacacatggtgctggagaatacccacttaggtctctaaaatcggggtactcctcccaaatgagcaaacagagtcctgcctaaattcaaggtaggcagagcctttttgcatccttgggaccaaaggagggaagtctttgcgttaggaggcccttaatatgacagggacatatgatagggacttgtcctagagaaattcattagcaagtaagacaaatatcccctctaacatttgccatgtatgaggcatccagggaaaagtcagatgaaaagataaaatgagatggatgaacagaaagagaaaaaaaaaagagtatggtaattttcaggcaaggtggaccttggaatgacttgtgatgtccaagagtaggtggaagagtgtactcgggactaaatgtccttgcatgtgtccctcgggatcagaccctggaaaacacagtctcaaagagatggggttcatgggggaggtgactgaaaatgtccacctagtgctaacaggaatgcctgggcatggaagaggcaaaaccactgctcagtaatgataatggcaaacttggagcagcaaaggaagggatggaggcgtggggccagagtcaggaaagtcgtgatggaggctgtctttagtaactaagctgacgtgaatacaggctgatcaggggacagatatagacaaggacacctgaaccagctgagaaggaagagacgccagatgaagagactaagagacaggcaggcaggctagggaatgcagctcagttggtagattgctcacctagcgtgtacaaagcacagggttccaccctcagcactacattaaaccaggcctggggggaggtgtgatgacacagactatactctcagcactggagagatagagatgggaggttcacaagttcaaggtcgtcccttgaatacccagcaagcttcataagacaccctcccctcaacacacaggcacaaagttctgaggaaatggttcgttaaataaagggcttgctacacaagcgttaatgcctgagttcggatacccagcactcacaaaaaggcaggcacagggagcctaccatcctaggactagggagaagagaaagacccttggggcttgctggccagacagtctggccaactggtgaactccagcttccatgagagatcctgtcttaaaatacaagatagacaaagattaaggaagatcctcaacagcaacctccgccctctacactaatgcaaataaatatacatgcatccacacccacacatgaacacacatatgtaccatacagaagagagggacacagagccatgccgtggcgggaggggggatacatgaagatagatagagataccccagatgtaggggtacaaacttgtatcttttgttaaaaagcagaggttactagggatgagagattatctggggaaggcagcggcacttgacagattgcagttgttgagtctgaattgaagacaggacatctgtttggcacagattccatgggaagcacgggctgcggtatgaaggccccgcttctggtaacagccagtctgttggtatgaaacaggaaccccatgtttaacttctcaataattcttctaccttcccagatctaggatgggggctaagaaaaccactatggagggatgagaccagtcccaggagccagtaaagacagcagagtagaaagagttagtgagcccagagaaagctaatagccaccacaccttttacaggctgcccaccttctaaatcctttacaaatattgactcttataattctcacaactattattagccccagtggaagcacgaggaaagctgtgtggttactaactggtaaaaccaggacttaaaccaagaaaggaggactccaaggctatgctccaaaccaccgtgtatgtagtctctcagtgaagaggtggcgagttagggtcatgccaccactatgagaagtctcttgacggttattatatcaccactatatctcagaacttcacagctctttcagaactctgaatgatgggcttttttgtttgggctgcattggtaactcgatgtcatgtgtacacctgagtgcatgcaacccatgtgtacgggtggccagaagagggtgtcagatcccctggaattgaagctacagatgtctttgagctgccatgtgggtgctgggactgaacccaggtcctctgcaagagcagcaagtgctcttaaccactgagccatctctccagcctctccaacaatgtgtctcctttttcttcctagccatcatttcaaatgtcttcggttttacaggccatcttttctactggcgcctaatctctccccgggttttctgccactggaagaacagcagaagtgccatgtattaacccacttgtctggagcccccacttcttcaagcttctgcagaccacacaacttagctctgacttctctcccacattccaaagacagcccctcccttccccaccacctcaaatccaggctccagactggcagacacccacaggagggttgcacccacaatccttttctctttgccctttcaaggttctgatggggggaagggtggagaggggccacccaggacgtactctctctatgaagaatggtgacaacatggacactagtctctgatgagggttaaataaaagcccttggcctcagaccgaggtgatgaggtgaatgcaaaatttccccattctcaggagtggcctgagacaactgcccttcattctgtgctaagccatttggagtccaaaactcctctttctggccagtcttcttgcagtttaatctcaacagggtgcctcatgttatcccttctctctgccctttccagggcctcactactgtcctggacaacttggcctcagtgtgggcagtagcactgaccagccaggcaagagaagaatctaggccggagaagggagggagagtggagctgcttttttcttcttctttcatcctaaataactttttgcaggaaaatttaagggactcgagcatctttccctcatcacctcgagtctctttccctcctcaccagtgcttcgtgcctcaaccacctgtctttgcatctcatgttcagaaacccagcctaggagacccagaaatctcctttatggaaatgggccttgctacacaactcacccaccagtcgcagcacaaaggtaaagagctgcatatgagcccacccagacctgaacatcccagcctccctggtccctaggggaaagacagagaggaaggtccctgggtcttctgccagccacttcttttctagaccaagccaacaaagctgagtgtaaatgagcccatgcagagtgcaggtgggagccatagagagaacttgggaaattccagtttatcccccacataaacagtgacccccaaagatgtacgggtacgcgttggagagatgttatcctccccaccccagggtaagggaaagcagtaggattctgtattcaagctacacaagaaatgggaccataccccccattaccccccagctggtggaatcattgccatttgatatccactgagacaacttggctgctctgggctctggatgggggggtgggggatggctcggaaaacagcagttcctttcaggacccaggttggcaagggctttgggaggctggactggcccagatcaccccctaactccccctccttccctccctccctcccttgccaccaccaccaaaggctgggcgggtaggtggagagattggcactgcctgggtcaagcctaccacctcttcggtctaaccctggaccctccccctggcatgaagccatctctctccctcttccccgtttcctcttcctgaagaaccagccaggacacctggttccttctagacttggtccccatacccagtcggcaccctggggaactgacaagtcctaccctttggcagaggacggaattgccatcattccaggaacatattcaaaactccttggagatgagggaaaagtggccacgatgaaactcagttgaggtcatggtaactgcgggctcatggcgctagtctcgcaatgccttcccacctaatcccaaacaggaggctctcaaatcttccttcaccatctcctgccctctcagactacataaagcagtctgtcccatagggagaaaaaaaaatgtaaacaccacagcaagggcagtctgaatttgtattgataagcaacctagtcgggttttaggcgtgccttccctttggatccaactctgtcgttgctttctttataccctcacttcttgggcatcatcagcctccccagggcacttcagttactggaatgaaatcccaagataccagaagtcctacccccactacttttttttttcttctattttgaccttctaaccatcctgggcctcagctctccctaaaatcagttctttcctgttagtccctgttggaggaggagacagaataggagagggaaatctctggagggcgaattcataggccctaatctaccctctgactccagaagaaacagcctgccccttctgaacttccccttgtgaagcaattggagggttgtcggtagggaggggtgtcttgatgtgggatccaggttgggatggaagggagagaaaagggaaggagaagagaggagggtccccaaagcaccaggctgagtgtgtcttctaatgtaatgcttgtttttctccccatgtgtaaacgggtgatcagatcctcgtcaatgagtgtcactgcgtgggtgtcactggaagggggagggctgggagcaggagtaacctgtcgctactggaagcaggagcaatgtctgtatgcctgtatggtgggtgcaggcttacgtgtgtagcagtcgttgtagtaactggacgagcctcatgccactgcaggtatgccaagtgaggcggggacatcacggaaacccctttcttagatggaaggcctgaggtgactagcctacgtaaggtacccttgatgaggagcccttcccaggaaagtccacttgggactgaaggagggagacccggattgtactgctgaggccaaccaaccttagtgtgtctaagggaaccaaagggttggggggccctatgtctctaagtggacaggaccccggccagggcggcagcactccttcctggggctagagtcttaccttggctcgcaggtgcagtggttgcaccgatggaccgcccggcagcgggacagatgaacagacggggcgggcaggagtgacgagcggagctgtgcgacgggcagggccaagactcttaaaccccgagctgggatcagataagagcttgtccgggggccggggccggggtcgggccggccgggggcagagttgggccgggccgggccgccccctccctccgcagcgctggagccaaactttgagtgaatggaggggcccggagggggccgggacgacgggggcgggggagctcggggccggccaatggcagagcggagcgccaggaccgagcctgacgattggacatacttgggcaaggggcggggcttagagggctaggaagcgcaaacccaagctgactggggcgcagaaacacccaaagacagagacccagacagagtcccggagaaagagagatgaagagacgatacgaggagcgatagaagccgagctggcaagatgacagggggagagagaaagaagaaaagccaggcggccgtgtcagaatggaggaaccagggcgagggccgcgggggcgggactgggtcccagttaatgaggtggaaatgaattcaggacgggctgcgactgggacgagactggcagacttggcctgggctcctggggctacggggctctggcatccccaacagtttccaggttattcgctgttccctgtttagagagtgcggtgctgggtgcaaagggccacctaaaaccatcgccacctgcaacaacttcatctgggagcaaaaataagctgccctctggtgcaaagtgtgggagacgcccaaagctgcggaagaagagcgaaaggtcactctatttaggggttccccacaaatgtttgaggaaagagatgacatttacttaagtcctgggagacccagggagccatgtcctaggagatggcaggaaggacactttcggcagaggaacggcctaagtgaagccctgaggggacacagatgtacataagggctaagaaaatagcatcaaactattcctacacactagagtactctcagcaaggactgctcttttacctgcacccgttttgagtggtttgtatccactgtctaccgtatagcatgtattaaagaaggaaataatgacttcccatttttattcatagtagacactgaactacttactgatcaatagccattattacttacttaccatgttaatataaattcggggttaaaagcagaatattttagtttagcttgaatctctgaaattcctaagatgaataaatgtgccttttgaaaagccctctttgaggctgagggtgtggctgagtggtagagtgattacacagccctgggttccatccattaccaacacagaaagaaagatgggagggagggagggaaggagggagggagggagggagggagggattgctgagaagcaggcgaggaagccttccttagccgaggacagggttagctaaagtttagttcttagaagtggaacttgttctagaagtatgggaagacccagggtaaatatatggttgttatacaatcggcccagagtttctacagacaagggaaagcaactgagagttctcaagcaaagtagataagcacatgcagaagctgggaagagtaatcttgaagtacacaagctggtttgaatctgaggagaaacagaaagcaattggattagacagggagtaatcacaattgtgtgggcacaaagaaagcctggctctgtatggtttcagcagaaagtgaaatagaaaatagaatgggttaacaataaaaaaaaaaaactccaaaggacaaatttggcatgtgagcaaagagaaaggcttcagggatcacactggttctgaactctacaaaccaggagaagtatgagatcattgaattccagggagcagccaacctgctgaagaaacaggtaactgaggcagagacggtaagttaggagctgggaggggtgggtggaggtcagaggaaagaagaaacagttgacagttgctgccaaagcaacacagaagccatgacagcaagactggtctcaactaggactgtgcttggtggaaagatagaccgatgaaaagggaggaatacttacacttgaaggatcagaaggagaagacctccaaaaagtcacagttgactggcaaagaatggattaagagagctgggtgtcaaacagccaaggaaggaaggacaaagagaggaacttaggacagtgtctgtcaatgcagaaagagaagtgttgggtgtgacaatgagaagtcattagtgacatatgagagcagtttttttttcttttccttttctttttcttttttttcatctttcttttttggtttggttttgatttttcaagacagggtttctctgtgcagccctggctgtccctgagctcactctgtagaccaggctgtcctcaaactcagagatccaactgcttctgcctcccgagtgctgggactaaaggtgtgcactgccacggcccagtcagagcaatttcagaagagtgatccaaaggggaaccagattacaaggtgctacactagaaagtgagacaatgttaacatttacccttgtaaggattttgcttaaagaggggaaaaatacaatcagagccaaagcaatgaaccaggaactatcctcctgcttgatttttgttttttgtttttcaaatttctgataccttctgctcctacgcaaatagagatgagtggctaaagtaagatgatctgaaagcctggtgggtaggcctgcaatcccagcagcttgggaagctaaagcagaagggttgcaagctcaaatccatcctgagctacagagtgagctcaatgccagcttgaaacaactgagcagggcccgcagtcttgacattcagagaagggaggatttggaggctgagctcagactacaatataaaatggagaacaaatgcagagaagagaagccaaagaactgtcatggtttatgaaatcattccgagacatttatcatgaatttattattttttcaaaaaaaaatgttacccaagcatttggcatcaattgccaccatgtgtgcatgactctaacccacctgggtatatatttcaaatatatacccagtacttagtacaacatagacagaatcatcttgctcgcaggcgtgctcccctttattccgagccacagtgaatatgtcaccaccatccagctgggaacacagcagccatcccagactctaatcctccttatgccactccattgtctaaccaaggcatcttcactctaaggccctgaataccgcccccaagccttggccattgctgtagtccagagcagatgcacctctcagcagggctactgcagcagccatctaactggttcattccctccagcccttctacattctaacaacaatccttcagctcatgagtccctttatgtaaaagcaattaaggccagcaagatggctcagagggtaaaggttcttgatgccaaacctgatgacctgagcaatctccagtactcacatggtaggtgagaagcaactaccaaaagttgtcctctgacctccaggtgtgtgttgtggaacagccataaacacacacacacacacacacacacacacacacacacacacacacacacatacacacgcacacacacacacacacacacacacacacacacacacggggtggggggagaaatgtaacttttaaaaaagaatgaaacatcaataatgcatttctctccaaaactcaaatctgactcgacactttccacttcaaaaaccttcaataactgcaattgtacataaataaaagccacattctttagcatagacagaaggttcattataacctggcctgacactattctactcttgtcttcctctgacacttcacatccaaatctacagccaggtcctcctttaatacccatggttgggtcttgtgttctttctgtatcttgttccttgccccttggtcacacatcctgactatgtacaaatctcgagtttccccggtattcttactggagctctacttccattccagtacctacaagggatttccaccctcacttgacaagcccaactgaacccatacttttcccctcaaccctccccaccaccgatgttgggaatactcagtttccttatttttgtgtaactcctgtcaagcagactgaaaaactgacaataagtagggtctccatgtttgccctactatgtcctattctgtggcatgccaattcagccaccaagttttgttaagtctcccttagttatctctctctaggatgcaaattgtcatttccaccaccagaattagcccaggatctgacccatccttcacccttttctccagtctcaaagggaaacatacagtttccattaaagaagtcatatataaaacctagaaccttgaacaaagtgggatgtggtggtatacacctctaatctcagcactcaggagactctctgggagctcaagcctggtttacataactggtttcaagcctgccatagccaaggctacataccaagaccctgtctctctctctctctctctctctctctctctctctctctctctctctctctctctctctctctcacacacacacacacacaccagtaaaagatcccctcttactagtccagtctcctttgctaaccctttgaagctatggtggaaacaggacagaaaatcaacaccctaaagaagaaaaactggctggataagatccttccaaatagagaaagaagagcagctatttgccaaagctcagagagagggtgaggtggtgtgggatggaattggccagttggaaagagttagatattctagaaccacggggcttcagggctgtgagaaaagcagtttcagtggcactgtcatgtctcattttaagagtgacttaaatcaggtttccattcttaagtaatcatgctttattaccaactatattctctgtatagatcagatcagtttttaaaatttaaccttctgccaaagagaagtcctggaacacaccacaaccacaatagcaccattggtgatgggtgcttagcaaattaatgtttctgagtgtttacttactatgtgtgataaatttgattttgctctttttgtttccatttgttctgtttgaaaaagggtcttactatatagcccaggctgacctggaacttgacattctcccgactcagcttcctaaatgttgggattacagctttgtaccaccactcctaactgtgtatgatagaccatgagatggagaaagcccagagtcaaaagacattaggtagctggcctatatacagtaatatgcccagcaagtgttaaatctggtatttaaacccaaagtttgtcagtgggtaacagtagagagccctttagtgatttaaacataatctcattttcccaagcagaggttatggctcttggcaaaatgtcagtataaaaaaaaatcttctcagcattggccatgcaagaggacagaggaacccttttcctgaggacctccttttctctcgtgtagtaactgtgtcttccttgttttgaatcattgcaacattcagagttaatcctctcaccactggtctctgttcttctattgcctcattcaaaattaggccaattcccctcagcacaaaagaggaacatggcatgaagaccctttgcagaaggagaatccatgagtgggcatgggacaagggactttttgctgggaagagcaagtgaggatgcagggaagcaaggaagtttgcacggagaggcgaggccgatcctcagaacaagcagcacttgactcatcatcagagctggctagactcaacaagacgtgaactcgagtcctggggactcccaggaacgtgtttgtgcgtaggtcccacagtattaacaagttccactaaaagtagggcaactcatggcaggatgacaggccacagaggagagcatgtttaggtaagttgctacctttaagtacatataatatatacaagcccatgtttataagacttaagaggtgttggtggcgcatgcctttagtcccagcacttgggaggtagaggcaggtagatctctgtgagttcgaggccagcctggtgtccaaagctacacagagaaaccctgtctctaaaaaccaaaaaaaaaaaaaaaaaaaaaaaaaaaaaaaaaaacctttagttatgaatgactaattactttacagaaggactatggaaggcagagagggagggagggagaaaggggggagtagggagggaggggaggagggaagaatacgttctttataaggcttatctagtacctctgtaactgggtccattgatggaaattctgttaacatccaaatacactgtggagaggtaaggaacgggaaatcgggaaccctggaagtgggaaagctgggtcttagccccgcttcttctcttgagaccctcttttcatctgcacagtgagagctgctcctggaccacctctaaatgctggtgtgtaagttttactctagctctagccagcccagtagactggcagacaaaatagactgattcttctagggccaaatccacctttacttatttatgtagagatgtggcctcacaatgtccctctggctgaactagaactcactgtacagaccagggtggcctcagactcacaggaatccacctgccaatgtttcttacatgctggggttaaaagcgtgcaccacacacacacacacacacacacacacacacacagagagagagagagagagagagagagagagagagagagagagagagagagaccccttgaatttatagcaattgctatttggactgacttgaccttcctgttccactaaactcacatcctcaaccatctcctgccttccctctcacactccctcccccatctccacgctttttcccaagaagtctcatgatcttgttcaaggaagccttcccaggctggctgaccccacagctggcgatgaaggcaactacagctgggtgtgcgtgaggggaaggctgccctgcactcgtcttgcacacaaactcagagctgttggggaaaggaagggaatgtccctaccctcacttcaaagcagcagcagcgaaacccaaaccctacctcttctttaagctccccgcaaaactgagatatctggagagagctgttgttctattttacgcatattgtgtgcgtgcgtgcttgcaagtgtgcatgtgtgtgtatatgtgttagccctcaccatacagacatacatagagattagaggctgatacctggcttatacatatacactgtcatgcccagcttctctgtgggtgctgtggatccaaacccaggtcctcacgcttgctctgaaaatactttgtccgctaagctatctccccagctctacaccacggttctttgtagaccatcagtgtggctccagagttggccttcctgtccccagtgtcttcaatcttccaatctacatttattacaatttcactgacatatcgggattgatcacttgcagaactgcttttgttctcttggtacagaaaaatctaggatcttacctatttttctgtacactggtggcttgtgtaattttcttttctcatgcctcagttcaagctagataaacaaggaattaaagttaaatttaacaagttaagcccagacctggaggatctggccaccatgtgaaagagtgttgttgcctgtcagctaggttaagctcagggcagctaggatggagtcagagggctggttgacaacacctggagggcactgtcacctctgtgactgtccctgcagaaaaaggggccagctcttcgcaaacatgttcttgcccgggagtttggtttcttctctctgagtgcctggcacagtgaaaccaacgtgagcagccacttggcagggtagagaagagcaagctagcagtccccaggctcaggtgacagagccaggcccaggagacagggatattgactgggactttaacagcactgttgatgccaatctcgggcaaaaacctgatatttccacttggaacaataagaaacagccaacaggatgagagacaggtcagtgaacagggagagccccctgcaggtctcactgggtgatgccagaacagaagccggcaggccctgctggacagggatctcaggagtccccggagatgatgagaatgagggtgatgagggcaatgatgatgatgacggtgacagcggttgcaaggaaaagcaagaggaagaaagaggaaaacataagatgttggattttatgtaagcaatcctcaagaagtagatactatttattgtggtttccatatgaaatgcccctccctaaagccccaggtattggaggctgagagccccagcttgtggtgctattgagaggatattaggttgtaaataaggagctgacttcattgatgaattaatccattgattgaataaccctgaatgaactataagtagactacatggaggaagaaggccacccgtggcgtgctctagaacagtcgttctcaacctttctaatccttcaacccagttcctcatgttgtggtgacccccaaccataacattacatcattgttaattcataaccctaatttgtctactttcgtgaattgtaatgtaaatatctgatatgtgaccagcaaggggtcacgaaccacaggttgagaccctctgctctaaaagagcagttcttcctctccccccttctctcctcatcttttcctttgcctttgctctccccttcttctcttctctctccccacccccacctctccagtctccatgagttctgtttttccctgctgccgaccacaacgctctgtctcatatgacccaagaaaaatggagccaaacaaccctggactgatacttctgaaactggaaaccaatattaacttttcatctttcaaattgattcagttattctgtcatagcaacaaaaggtgactaatacaacatggctgttctcatttcttagacttaaaaaactaacatttgggctggagagatggctcagaggttaagagcactgcctgctcttccagaggtcctgagttcaattcccagcaatcacatagtgactcacaaccatccgttatgagatctggtgccctcttctagtgtgcagatatacatggaagcagaatactgtatgcataataaataaataaataaataaataaaatctttaaaaaaaactaacatttttcaaacacagtggctcatgtctgtacttccagaactaaagagacagaagcaggaggagctacacgttcaagtctggcctggactatatatataatgagttccagaccaatcagggattcataatgagactttgtcaaaagaaagaagagtgcaaaaggaaggagggaggaggaggaggaggagaaaacaaaaaacaaagagaaaaggaatggagtgggatttgaactcaaatcattgcctctgaaatttatattgctccatacaccaatcatattcttaagtgaattccagaaactttgccttctaatgtgcagtcctattcctattcttctagttatgtgtccttgccacattaaggctcaggagagcacatagaaaaagcatcttgcacataacaatattggtgagagtaatagtaacagcttgaatttatacaccactctttgcttttactcatttccctggggctggtgactgatggatggggatgtacttctctggcacattccttgcctaccgtgcacaaggccctgggttctacccacagcagtgcaaataaataagtaaaatgaataaataaatcctcgggtgaaattaacattgaaatatttttatttctccaaaacatttcctaatttttaatcagtcattttgcagttgttttcatataaccataatcagcttgtatggatattttatgtcttggtttccttttctttccccttctttctttctttccttccttttttttctttctttttttttctttttcttttttttttttttttttttggttttttgggacagggtttctctgtgactttggaggctgtcctggaactagctcttgtagaccaggctggtctcgagctcacagagatccacctgcctctgcttccgagtgctgggattaaaagggtgtgccaccaccgcccggccccttcctttcctttttaaagacaagtttttatgtaactgaggctggctttgaacacgacgtgtagcccaggttggtcttgaactcttcaccttgaactccagcctatgctctactttttttacgtagcagccctatctgcatgcacattcgcatacataaacatatcaactaccatgactttctgcagtaacctattatactgaacgctacagttatcacattcctgtggtgatgtcagctcatggagctgacagtaccaaatgctggcaaggacatagagcaacaggaacaggaaagtgctgctagtgagactgtcaaatggtaccgtcactttggaagacgatttggcagtcacctgcaaaactaaacatattcttcccatatgatatggcaactgcactccttggtatttacctccccaaaagctgaaaacttctccaaataaaaatcctgcacacagatgtttatagcaactttatttgtaattgacaaaaactgaaagcaaaacgtctttcagtgggtgaatgggcaaatgaaccgtggcacaccctggcaatggactgttactcagtatcaaaaaagaaatgagttatggagctataaaaagacatgcaacaaccttaaatgtaaaaaggagctaatctgaggggctacatattgtatcattccaactccatgacattctggaaaaggcagaactatggaaacggttaaaaaagagagagagagattgccgaaggctaatgggagaatgggatgactaagcaaagagcagagaaaagcactccacactgtaatagtggatacatgccatgatacactgttctggacttacggcaagagaaagcacaccaaaagaaagctctaatgagagctagagactggcgatcatgctgtgccaactaaggtttgttgattgtaaccaagctgctattctcattggggatgttgatggggtgggaaggggctgtgtatatgccaggcagaagacaaaagggaactctttgtgcctttctctcaatttatgtgtatgcctatacatctgtatgtgtgcacgtactcgtgtgtgcacgcaggggccagaaatcgatgtcttcctacgtcactctccatcattaaacctggaactcaccagttcagcgatgctaactggtcagtgggcaccctcctgtctctaccttcccagtgctaggattacaggtgcttgccgccaggtcctgctttttacataggtgctgaggacccaaactcgggtcctcatatgcagggcaagcactttactgactgagctatctcccccagattcctctcttgatcttttttttttttttttgctgtaaaattaaaactaccctttgaaagaagtctttgtatgcatgtctataatcccaatacggaggaagccaacctgggctagacagtaagacctggggaggggggcgttgcctaccaaacaaaaatatcacaagtctttttttatgataagcttgagggcagtgacaagatgtgcggctcttatctctctccaactccggaatttaataagctactttttcttcatccataagtagaaaaaataagtgtctcatagacatcaaatgagctgatgcttggtggaatagcaacagtagcgtgcagcagtagtcctactctgcgtctttccttcccatggcaccataatctgcttctgggtagagacctcttcaaagtttcatgaacacctacctctacctggcaccgtgtgtagcatttgggccccttaagtctgttgatggtgagcactagcctaaacttttctctccattggacatttgagggttttctcgactttttgctattagaaaaatacatctcaaaacgcttctacttacattgcctaatttggcctgcatcccgtgtgaaccaggcggaagagggctgtttgcccatgcccacactctgagatagaacagctatggctcagcgaagtgaagggacttctgtcgcatcatgtatcggtgacgacagaatggctggccctgcctctagctcctacctccacagacctcttttccttctagctgttgctcgcttcatccgaggtcttttcaaaactggagcctgccgtggtgagcctggtctgagagcagcacctttacccagtggtccctgcgggggatcatgagctgtgagctcccagatgaccccctgaaatcagacattttattcccaaaacatccaggcctctattttcccagaatgaggagctagaaaagggccagcatgccaagcccccagcccaccatcctcctcacgtatgctcccccccaaccctcataaaggggtgaggagacggctgtcagtgtccaggaggagggacttgggctaaaaatagctatggcgtgtggatcaaccagagtggtacccaggactgggaaagggagggcgacgctgtggagctgtagccagactggttgccatggaaacgaaagaggagcaggggaacctgggaagtggggatgacacagataccaagtcctagtctgagctgccgctacatttaggagaaacagcagtgtctgcggctcccactctcaaaggggacccatggtaggggggagatggtgtcagggacctgggcaccaaccccccagggtttctgcagccggctcctctcctctccaggctctgtgagttgagttgtgggacttggggtttgggccccaatttctaaggcaagtggggtttgggtggagctggttcctgagggagtttccaccagatagacctcctataaaagataccccccccgtactagccagcactctcttgggggaggaaaagagtaccaagaaaatgtggtgctgggatctcactgaaagcgtcccagcatgcccaagaactgtggtgggaagagctggagttatttggagggaagaggcagaaataaagaccttgctctttagttagtggacagtgcacacctttcctgtcctgtgaagaagaggacccttcctcgggatgacaacagctaggatgcagtcaaaaggctccctgggcaatcagccttttggggttgatcagacattagggtcccttccccattcctggccatagatggaggtcagattacctaagaccctaaggagaatgtctggaacccacctgacgctactgctaggaagaaagagacctagggtcttggggcactgagtacttacagatcacttccagaggacaccctgagctgcagagagggaagagcaagcctgctgttgggggaggggaagatctaatctgccattgccaaggtgttcgcatctcctgacccccatggaaaataagggtgggggtccttaggatacaaaccatctctttgtggtttctccttctgccttttatctaacatacacacaccctccaaaggtctggctgcagaacacttcgctccaaaattttaaaactggaatgccgggcttgtagttacatatccatgcagtttctccctaggacctggtcatcgaagccatctgtgagccttatgtcacattcttgtgttcccttgccctcccaaccctcttgcctctcctccccctcccaccccaggtttccttggaatgggaaatcacaaatcccaaaaaagagacaggaaggttgctgaatcctaaatccttggttcatatggtccatatctcttaggggaccctaagcgcctagggaaggactctggacatctatctctcagggaagactgcaactcagagtgcatctcaggggcaagaatttgaaacaaaaccaggtgggttttgcttggaatctgggctttgcttggaatgtgggctttgggacatatggctggtgtgggtgggcttgctgctagggtagtaaatgcaaagcagaaaactgggagggggattgatgtgggcgcttggtgtttcacttggtctgatttcttatctcttagaaagaatcgagttggaagatactagactagagtaaccctggatggcctggagcttcctttattcttgctgtgggcagttgatctcacatggcctccagcctcctattgctaagcctgttcagcatgtctgctctgggaaagagcccaggagatgggctgatatcaaagcatcagtgaccatgattaagcaatcagaattgccagtgggaatttcctaacgttgggaacattgaacctttgcatattggacaggttcttttgtgcacagcttactttttttttctctctctctccttggtaagtctggggtggagaaacaatgtaggaagaggtggaaagagtgagattcaggaacagaagagaaggaatagccttggcatgaacttcaaaacagcctttaggtgggtcttcctataggatgatgaagagtccttggggagaggataatagctggggaacgagcgttggaagtcctcatccctgccaaggaacccacgtcttagggttttagaatcccaggtgtctggtagggcttgcctgtgaggtgctacacactccggcttgaggtagtgacaccgagatctgtgtcacggagatctctaacacttccttcccatggaacgtacactgtgctgcccggtccatgttcattaccctgtgtgatccctactttttcttaaccttcatttttattttatgcgtgtgggtgttttgccttcatgtatgctgcgcatcaccctcggaggccagaagagggcaagagactggagtggccaccggctgtgagcccacatacttgtgggtgctggcagtcaaacgtttccagatcccctggaagagcaagcaaccagtgagccatttgagccagccctccagccctcccgaccccccaactttctgagtccgtgggcggttagggttgtagttcccattccagcaagtgggggaaatcgaggctaagagaccccgagttcggggtggatccatcaactccggcacgcctctattaagtccccgcaggggtccggctgcggccgccatggcgcaggacaatgccgctttctccccggtgtcggaggagccgccccggcgccgcggccgccagcgctacgtggagaaggacgggcgctgcaacgtgcagcagggcaacgtgcgcgagacctaccgctacctgaccgacctgttcaccacgctggtggacctgcagtggcgcctcagcctgctcttcttcgtgctcgcctacgcgctcacttggctcttcttcggcgccatctggtggctcatcgcctacggccgcggcgacctggagcacctggaggacacggcgtggaccccgtgcgtcaacaacctcaacggcttcgtggccgccttcctcttctccatcgagaccgagaccaccatcggctacgggcaccgcgtcattactgaccagtgccccgagggcatcgtgctgctgctgctgcaggccatcctgggctccatggtgaacgccttcatggtgggttgcatgttcgtcaagatctcgcagcccaacaagcgggccgccacgctggtcttctcgtcgcacgccgtggtgtcgctgcgcgacgggcgcctctgcctcatgttccgcgtgggcgacctgcggtcctcgcacatcgtcgaggcctccatccgcgccaagctcatccgctcgcgccagacgctcgagggcgagttcatccccttgcaccagactgacctcagcgtgggcttcgacacgggggacgaccgcctcttcctcgtctcgcctcttgtcatcagccacgagatcgatgccgccagccccttctgggaggcgtctcgccgcgccctcgagagggacgacttcgagatcgtagtcattctagagggcatggtggaggccacgggtgcgggcaggctggaggatgggagcggtgatgcagggctatagcgagaatagcatggggcgcgcgggggggggtgcagaaagatggacagggagtggagtccagggtgacaggtggaggaggagggtgtgctgggccagggctgaaaatgaaagggatggacaggagggtgactttgcagagtcgagaaaaaagcttggaggagttctatgaaatgacgctagtttgaggccctgacctgacatgtatgtcactttgaatagcgctttacatctctgaattcatttaatcctagcaaggttcccctggaggttacatattattactgtggccacttttcagagaataagtagccccaaagaaaggtcccataaatagcccgctgtcacaagcagataaatagcgtagcctggattgaacacaggaagtctatcttcagtgtttcccagtgcggtgttgggatgaaggttaagtgcagagttcttgatgcccagaagtccagagccctggaattagactgttttgagctatttcccaaggaggcaaacataggcgtggggaggtgagaactggtctcacttctgcctcagttaccccatctgttactcttaatattccctgatgttgcaatttctagcacctttccagaaggaagtgtgacatcaatgccttcactcaggcctacactgtcaagagcttgggaccagcataggagcaaaagcaggtcccttaagaggccctagccaccaaagacgatagggaaaacgcaggtagagaaccaaaggaccaccagggggagcaacagcgctgctactgacagtcttgctccctgctgctagtcttctgctcctggtcctaggcagacgcatcctctgcttcctcaccatctcagttctatccaccccccattcctcctccactccaactaggctggtcctaaccctccccctccccctcccttacaaccccccctcccgtctctccagctatccctccttgttgacactatcttgggcagttttgctacaagaactttttttaattgtcttcttttccctttttcttccacctcccacccacccttacaccccacagccccatctctgcttctcaggtcttctctctgaagaagccctggggacctctccctccccaccttcactggatacatctgattccagctttgccataggataccaatgtccccaagatgtcacagggccagactttcaatgtcagccggtctctggctggtgaatgtttacacctctatttctgagatggtattagtttgggggagactctgaagtaggaccaaaaagatctgccctgaggggagggtgcaaaatcccagcagggaaggcaggacacagccccagggcaaggactgggaagggcagggtaaaaggacatgggggtgggagcatgtttgatttttctagagataaagctgggaaggatggtagtattttgggatccaaagtgcttttgaaaagcaagaataatgagccaaaaaacccaactcgatgacatttaaagggaataaatataaaattctacatttaggcttaaaaaaatcacttatgtaagcacagcatggagaggctctggtggagaaagactgggggttttagttggccacaggctttgctgtagcaacgtgatgcagcttccaaagacatttatgtaatgtaatcacaggccacttcgctacagcatcctggccagaagcaagaggtggtggagagccttcttttatgcatagaagaggccacaattggaaaagccatcacacttcatgcggactcctacctggtggtcctcggtgaccattctcatttgcagtgaagatagtaaacttttccaaagccagatcaagtgagaaatgctcctgagtgtccaatctgaggaagagatctaagggaacctggctctatatttacagccgctaaaggagcgtcaggtgggaagggaatgagcttctaggggacagattccagtttgcataagagacaacacagagccagatggctcagcaagcttaggtgcttgccaccaggcccgaggacctgagttagatccccagctctcatactgtggagagaacagactcccacaagttgtcctctgactgccacatacatcctgtggtatatatgctagggcgcacgcacacacacacacacacacacacacacatcaatgcaatacacaaaggactggccttctaacgaggtggtgagctttcaaccctgggaggtaatcaattcagctagctgcccattacttgggaatgcttaggagttggacaaggagacgatgagaagtgggcagctggaccagatgatccctaggattggttttaaggttaagattctcaaaggagagcaagggaaatagaggctggcaaacggagacgagagctgaccagagagagggggactcttgggggaaagaagagggctgtggggtaagaggcaggagagggaagctcgagctgcagtctctttgactgacgatgcctctcccctccccacaggaatgacatgccaagctcgcagctcctacctggtagatgaagtgctgtggggccaccggttcacatctgtgctcaccctggaggacggcttctatgaggtggactatgccagcttccacgagacctttgaggtgcccacaccctcgtgcagtgcccgggagttggcggaagctgccgcccgcctcgatgcccatctctactggtccatccctagcaggctggatgagaaggtggaggaagagggggctggggagggagcaggtgggggagatggagctgacaaggagcagaatggctgcctgccacccccagagagtgagtccaaggtgtgactggttttctccaaacccctgtggcagaccagggggctagacgcaggtacgaggaagctgcaggatggggatggaagaagaggaggcaggcaatgtcccaaggcatggctaaagttgggagaggcccactgagtccaggatccagtagggaaggaagaagtcctggtttgaagagaagagaggatgggaatgaaagaacccatcagtctgtctgtgttttgaccttcacatctgtttgtgggtggatggatggacagaaggatgggtttacagggttgaatgggaaggtggagcagacagagacagccaaaggacagcttgggtggcaaatggatcaagagctggtgaagccagtactgccttaaccccccagcacacctttgtgcgaaacctaccagtaccctgttcttccagacagaggcggcctcaaaccaggggacacggctaaaccagagggcctgtcagatggactgctgcccctgctcgtctcctcagctggtctccctatgtgtgacacacctgtctagacaaagtggccactgttgagtcagagaagagaaaactgggtagatgagggtatagataagaccctatccagcttcactaccccactatgacagggtcggaaaagtgtccacagccttagccctcggggtatagggaaacaagccaagggggtagatgctgagcaggagccctggagcaggaccaggagagacccaaggacaactatttttgtggcagtggagtgaaaccttaaagcagaagaaaggtcatgggaggcttaataagaggttttatgagggaagcctgatcctggggaaagtagcttatccttggggcacaatgacaagggcccattcaaaatagtgattggatatccatcaggtgtggtattcaaagacctggtcataacaccggggcacagcacaggtggaggtcagaaacacccacagcaactgaaggaagtgtggctcacactaggagcccacaggaagctcttaggacaagaagagggtgttagcaaccaggaagctaaggcttgagtgaggcaggggaaatgagctttgtgtcactcacctggagggcttgttaaaacagattgctgggtcccactcccaacattctgactcagtaggtccgggatggaaaccaaaaatctgcatgtctaactagttcccggatctaacaggttcccagatcgagctgacactgctagtctggggactacactgggctgaggcgtctaagcggaggagaagctgcaggcgctaaaaagaagccagggaccattaagaacagagaaatgagaagggaaatgtcagggaaagggagccaggtccaggctgaagagcttaactttgggtcccagaactgaaacgtcagtggtaattggccagtgacagcgaggtggcatctgggaagatgagaggacaacagaagcaggtggaaacagtaagaaggcctttggggaactcctgaggaggcagtgggcagctgagcttcaatgggcttcaacataaaagacgattagctagcaggactgacaaggcaaaactgactaggggagaaaatggagcttatacttccggctatctgctgcctgccctcttcctgtcaggacaggggaccctggagatacatactcccatcccatccccactgcatcctggacttgtccccagtcgtctcgggatggtgaggggagagcaatggtgagttgaggagcagaagatcggtcaagggacttgaagctggccccctggagctgagtgtagccagggtgaacagatcctctgacggggttagttcaaaccttggccctggctatgcccgctcctgtccttgaataaaggtctgctgctctactccaggctaagaagccagcatcccatggggcactatgactctctccccagtgcccagctcagcttgggttcactcaggggacgcaagctgtcacctctccccttcagtctaacactggactcaggtttcaggaccacctgggtcaccctcaaaaatgaggtccgtggacatgtacgggctagagtcccacatacacgtattgacctagaacacagggagcgtccggggtttgaattctggggaaaaggtggagtccgagtaagagggggtggggtgcttggcatccgcatacagggcattagactggagacactgaagctgctcctggaagtcactgagacgccaccattcaggcaccactgtccagggcagtcaggagacctgtgttctactgccagtgctgactgtccctagttacccctatggctctcagcaagacacattacttctctgggcctcagtttccttatctgtacaaaaagaaaatgatacttggcaaactcatagtgctcaataaatgttaaattactaaatgaaaagggaagactggatgccgcctgaagcacagaacagccgagactctccggacccgagaaccctcaggcagggagatgcagcggctctgtgtacacagaggacacaggacctcccgactgctgttgtccctaagtaggcagctgtgttccgaggctcccattctgctgtagtcagagaataattaaggtcaggatgacaaagactgaggccccagggcctggtgggaggagtctggcccgagactagcccaaccaggagaatgagactgaggagggtgtgccccagtctggggagcctagaaagactctctggatgctgtgaaaagggccaagctcagctggaactcaccctctcttcctatgtggaagccccattaggagttggctcctcactgacattttaggcaacagatgggacccaggcatcccctcctgcagtgggtgggtagcaaggcccaccaaggacagatggtgtttatggtgggaaaagaggcctgggttgtccagaataggttgtcaagccccaacaatctccctactaacaaccaccccctccccacgcacccccgctgctgccttttatagcttcgtggcaagggaaaacacaaccaggcctggattttataaaaccagtttattcacattttaaaaaaacaaaacaaaacaaaaactagtttgaggacaggaactggccttcctacagcatgagtgtgagaccaaggacagagaacccgaggaaaggtgtgaggaactggggagccgcagcttccactctaggcagggacaggacaaataaattaaaggagggctgggcggaggaggggagggtatctaggcaaccggaggaggagcggcgctggctggaagacagttgacacctgcagaaactagagagagtatgtggagaaggctgaggaccaggctccctttggccctcaccctgctacatgaccctgcaggactgactgagctggcagcttcttgtccagatggagcacacaggaagcccgaggaagatgggacttggggtaccctttccctcacctggggtgctacagatcaccgcttccgcagcctcttcataaagcagcaggtgatcgtagcaaggacgctggcgccagtgactagagcaactcctgtacccaccaacaggggcacgaatagggtatccagggctggaagaaagatggctctgctcagagagtgccatggtcctccaccggctgtcgtacagttctctggcactctccccagcaggttttcctgactcagtgggccatccttgcccacctacaaccgcaccaatcagcacggaggtcagtttggggctcttcatgcaaagggatacaggaaaaggatagcagggaagacaggaaagcagaagggggcaaacacggttggagcagatgagtggagggtagtttccactcaccatgtgtgtaagggtagactgtgacaggtccggagcgcgcactgcccgcctggtaccagctatagtccgcatgctgcacccaggcgcttggggcgcagtggtatatgccttcatcctcaggccccaaactgtgtagtcttagacgatggctcttgggtcccaccagctccacactgacaggaccccctccaggccggactcccagctctgccacaccatcctgacccactccacccacaagctgagcagggccagaacttaactcgccctcctctggtctctccacccaccagctggcggctagtcgaagccccgggggaccaccacgcacagagatgttgcatagcagggaggcagtctctccccggtacacagtaccccctgcgagccatgccacggcctccagcaccacacctgcagagcaagggacatgggggttacagggtgaaggctcaggggctaggaaataaattctgtaacctctgaaccctgccaagggttcagctctcaccttcttccctcacatgcacagggaggggccgggaacgagcgctggcagcttcacgaagccgggtcccagaccctcgaacataggctttggcgaggcagcgataggtgcctgcatcaccaggcctggcagcctccaatcgtagccggtaggttctggatgccactttctccatggcaatgtggcggccctcgtagccagggcccaggctgcctacaccttctgtgtccagctgggccaccaggcggccaggcccaggagcccctgcaggagccatctcccagcccaccgagtacgcagcatgccggcctgctgggggcagtgcccctgacacattgcatagcagttccaagggttcccctgggccaatccgatgctcaccaggtcccactgtcactgctagctggctggctgaaacacagcaggggaaggaaggagtcacagagatgcctggggcccgtcctcaatacctctttgcaaaaaaacgtagaggcctgttatctgtccctcaccccaggacctgaatttcacccttccaccatagcccttgtatctccacattcaatatctgagcagagaaaccatggatagagagtgagtaatgcctggacggctggctcactccagggaagatgatgtagcaggatgatggtcatgtagcaccacccctgatgcccactgagataccccctcagggggacatgtgacactcacacaatgtctgcacatccacatgggccaggactgccctcttctctgcgatctggacccaggaaccgtcaggatcctgaatccattcagcagcagtgcagtggtaggtgcccgagtctgcagcctgggcacccccaaccaccatgcggtaccggtcagtcccttccttgctcagccgcagctcccccgcggccagcctctcagcgtagggagctccagcctccacggccatgtctgagcgcagtcccacgacttcctgtagagtggcccgccccactggcgcctcaggaatggctctcccaaaggatacggacaggtgtgtgtgtttctgtgttttggtctgagccaggcagcccagcgccagctcctggccctcgtgcactgtcaggcgtgagggggaggttgcagcctgacggcctcggggccctggaggggcagcagatacctgcagctcatctggaagaactggagagaaaggcgtcagtgagaaagggttgggagctggcagcccgcatgtaccttacttcactacctactctgtgggctcctggatggcaaggactcctaaaactcagtggtgccaagcccagtctgggcataccaaggtgctcaataaatacttgctgaatttcacagaacaagcctgttgacacccactctggtgtctgagattgacttgttttaaatacacaaaaaagtaattctgtcttccttctctaaagaagctacacctcatggtgcaggcctataatcgcagctccccaggaggctaaggcacaagaaccaagttcaaggcccactggggctacagaacaaattcagatgccagtccgggcaacttggaaagtctctgcatctggtccccaggaaagaaacgaacgtgctagaaaggcaggcttgatggcagtggcgcctgacaccggaagacggctgagagttttttaaagtaacctggggctacacagcaaattatggaagaattgccattaatttcaggccagcctaggctagtgagctgtaggccagcctgggctacaggatgagacccagtctcaagaagcaacacaggggaatatagcttaggaggttccttccttggtgtgctcaacactgtagattcaatctccagggccgtgaagggtgtggggggtgaggggggtggagtggaaagaggaagaagaggagaaggaagaggaagtgagaggaggaggaggaagaaaaactaaatctggaaggctctctcaccacccagctcagagcccagtacctctcagctccactttggcactgtagttgcccagatactgagtatctgtggagggggtgtagcattcataaaagccagagtcctgggcttgaaggcgagcaatcttgagcaacacggagtctcccctcaggcgctgcacctgcaggtcaccagaagccacacgaggcccaaacacagcataggtgaactggctatccttggtgctgatgatgcccagtgaagtagctggggcctctggtctgtacatgaaccactcaaagtcttgctgggaagggccctcataggcactcacgttgcaagagatagagacagcagtgccggccacacggtaaagaggccccttggggacatgcacctgccgggcatagcacctgatgcctgtggggaaaggcagaaagaattggaatttttttttttttagaaagattgggtctttatttgatgcccagtaccatcagcaccattcttgaaagctgcctgggagcaaagggaaacctagggaaggttagaacacagctgggccataaaacacagatgagaccagggaagagatgctgggccattagacaacagcctctcatcacatcaacatgagccagatccacctcagaacagaggaagtctccatttctagctaaccagaggtagagcacctacgtgaacaaaagagtgcatctggaggccagggaggcatcccaataaggaaaatgatttctgagttcaagtccctgcaaccacacaaaaagcctggcatggtggccagtgaggtggttcagtgggtaaaagcagttgtcacagaggcctgacaacctgagtttgatccccagaatatactgcgggaagaaagaaccaagtcctgaaagttgtcctctgacctaaacacacacacacacatacaactctctctctctctaataataataataataataataataataataataataaaacagaaggttttatagcacctgaggttgatctagggcctttacacagactctcacacaggtgcacttgcacgcatgcacacacgtgcacccccatagaccacaaatacacacaatttaaaatgagaaataaataaagacaacgtctggctcctgactcccccgttcttggctgggtctttttctctaaccccccattcatgtgtgggggtgtgctcaggtggagcctctagctaagagattttgagacctttgctggaagggacctgacaaaatcttacagaaaggctgcttggcttagctctgtcacctgggctagacaatggagccagtggcccaggctggatggggtactgtcctggacggggcaccatgctgaacagggcacgggcctagtcagttctcaccacacaataccctctccactacagctgtgccatgagctcactgcttctcccagcccacaaggctacacaggcagctgtggcttctggggcaagaatcaggctctgccctggcctggggcagaagatcccttccccccagagtctgccaaccttctggctagcccagatgatgtaccatgcacacacacacacccgcacccgccccatcaaaagtggtcatttgcatatgatttgcatgtgttgtgcatcatttacatagccccctttctataaggagaccctaagctcctgctgtctctttctttctctccctgttctctctctccatctattttacccccacccctgtatcgacagacaaaccttggagtgttcagttgctttcttctctcaccattccatagctacttctagaaaagaccacagaatcccagaacgcaaggagggtgggcaatcatttcacaggtgagggaaattacggaactcccagaaagagcacatctagggaatgctggagcgaggatctgaacccagatctgagtccaaagctttgtaattacagaagagaaggcctggctgggaagagaaccacctctcttctagatagaaaagtaagacagtgtgtgatgtggtctagatcctgccatttctggagggtctctacacactccgaagagggacaaaaccaagaagatgagacacttccttccaaggggaggcctgatgtaccaaactgtgtaatttctaggattcccagggggaagtccacagctttgctgctggcactggaggaaaacacccagaagcctgagagccagccctcccgttcctagcgttcttcttctggctacgtcactcaacacatgatcatcacttgaagctgaggctagagtcaggaggccaacacaggaccaattctctcctctcccgggtctcagtccctatctttaagaactcagagcttctagttctgacgctgaaccagtgaaatgagtgactcaggcacacactgctccaggcatatttcataatcagggtgatgttaaagacagccaggctgacaccttcccagctgcccatgggcaggctgctcagaaggccccctcccaccttcctggctccacaagtgctgatgcttggagatccccatgggaaagttgtccccacaacctcaggaaataggctgctacaaggttctctctcgccaggccacctcctctctaacagccaaaggcctgatttgggagtcagatcgagttcaaatcccagccccaaccctcattggatatgctctctggaacaagatattccattttccttgtctgggaagtgaacctcagtgctgaatggggtgggctcagatgccagaaggctcttctctctctctgcaacattcactcctcccgacctcccctgggctcatccctgccccataaagcccactagggaaaagaggcaatcactaggcaaccaagccccacagctccttcgtttccctcattctgcctcctgctttgttccccaaggagagttttcatcctggccccagaagcccaagacctgcagcaggtaacagctccggcaccatgcagttctggtctaagccagagaagacagttggggtgccatagacttctgacttgactacaacaccccagaatcctctacacaccttccctatatccccaacacacacacacacacacacacacacacacacacacacacacacacaccagccatacaaggttgacccagaacacaccatcataaacacccaccagacactgggcacttggagatcccaggttcagtttccatggagcctggtttctcctgagacaatgatgttgggaccaaatgattgtgacaaatgtctcagggagtggaagaagggcaaagaggaactggcccagggtggcgacagaggtgagggagggatggtaaaatgtgtgtgttgggggggggggactaggggagactttctttaaagactgtgggcagaatcagcccctgggcctccagccaactctggggcaattatgaagaccgccaggcactgcccacgcaaagcacgcacccaaggctaggcctggagcctagagtggggcagaagattgtcacagtatttgggcacaaccaccccagggcctgggtgtaaaagctgagaagtggcgcctccctccgggggtccactggtgtctcaggagatggccaatatgcccagctcggggcctaaagctagggcgccaccaccctccccataactgactaggcaggcggccgcaaaacgaagccaggcgccgagcccagagagactggagactcgcctgatgaagaagccgggatgcaaacaactcggaaatgctaggaaggtgagctgactcggatgtgcagtgtcagcacctacccggccgggacagggacgcggcgaccaccaggcttaccaagcattagcagcagcggcagcagcagcagtgaactcaacggcgtggggctgggggcgcccattctgcgtaggcggctctggggaggctccgggggtcggagtgggctctggagggccagagccgcggggggcacatgcccgggtgggggggcagaaagcggagcagtgaagcgtgggtgcgcagagcccagctaagcgggagccgccaactccccgccctcctctcctcttcccctcctcccgtcgctcttcccgccctccgcagctccgagaccattcccgccgcgccctgctgccaggccccgcccccactcccgccccgcccccgcctcgccccgccccgcccgccgcccctggccgacgcctcggccagacttcgaccctaaccgtagctccgcctttggcctccggctgggccaactggcggcacctggactcttgtacccccacccaccctggctcagagcgcaccccgccctgcacctgccagcctttccgggagaatgggtgcttgcagagcctctggggataatggggtgactgtggttacgcactcagaatccagttgggtgatacgggctgctgaatcctggcagcaaaccctgctgacttacgtgggcacggcgtgacccaggactttctggacgtgaaacggttggactcaaggggctttagaaccctagaagatcactgaaatctgttctaataccgggtcagaaagcaaagcgaagagaaagtgggttagccgtccagacttcctagctggtgatcattgttcagcccaatcccttcaacctgagttttcccctccacatacagaagagagattgtaaacactcagttatgctgataattaactgagatcacgcacaaacgtttgttgcacacggtaactatgggggaggggagttttgtttttgccttaaactgctttctaccaattggagcctccaatgagaagatatggacacacctctctgctgggaagggtggagctagcctggaggtaggagaaaggaaggagtctcttccaccgtctccactgagaaaaacgacggagagtaggaagggtggagccagaataaggagaaggtacaggccaaccgcaaagccaaggctgtggaagcagccattagtggaaaccggcctagaacacatctaggtcctgcccctccacactctacttgctccctttatccctgcttcctctgtttactgcaccctattaaggaaagtgaggcacacagagcaaaagtggtccagcccagagctgacttcctactctcaggcaaagtattcatggcattaactcatgccagttaaagaaagccatattcaacaaccacagagaaacacagacagggtttgggaacccatggagaagccagaagtccaaccctggtctctcaagactgcccagcaacagcataagagactgtggctttccacctggacatatcccggcctggtttcctcacactacttctctagaagccatgttgagctgtgtgaaaaccgcaggttatgaggagactttgggagaaaaaggactctccctttagttggagttgattggatcgaaagccttcctggtacttaaggtttagaagaatcaacatcataatggcagccatttatgggatcatcacaccttaacaccacttgtggatgtcctttccagacttgacagtttattttacaagacaatgtcattaacacaagggaattctgaacttcaaaacagttaagtatcttgcccaaggccacacattttaagttaactgtgactttaaagctcaggcctggtgtgcacacctttaaccctaatgctcaggaggcagaggcaggcagatcttgagttccaggcctgccaatgcgacacagtgagacccagtctcaaagcaaacaaacaaaaacaaaacataaaagatccacaaaatctcagccctggctgtctccaaatcctcttgtactccactgttcactccatttaaggtgaaaaatcattcatggagcagataactgatttgattaggccaggccttgtgctgaattttggtaatgctagtaagtaatgctatcatggtcttctacactcaaggatgccattctttttcgggggaggaggtagggacagggcttctctgtagctttggagcttgtcctggcctttaactcacagagatagcttgcctctgcctcctgagtgctgggaataacactgtctggcaggtatgccattcttgttagtgcaatatcaggtaaagaggtagctgtcattatgggatggatgggggaagagcactcactgttcaaggatcttactcttggcttgggacaaagggactcccataccggtaagtagggcttaggggctgggctagtatctccagaggagttgggacctaaggagacccgatacacccctccgaaaactgtgaggtccatcagtggccagcagagggagcccaaagtccaggaccgactcactcgtaagatgcttatgtaactgggaaaagttgggggaggagagcaaatgccaggcacgaggcacatcacacacaggcacatgtccccactgaaatcaaggggcttcatgcagaaaggcgttgcacacacacccagcagggcgatgctcaaacacacgcgcatgctgcaaaggagagccagatcaatgccaaagactggagggcacccgtgctctcatgcatcactcccgcaagaaaacaggcttatgcggtatcttgactggtgtcctggggtggtatgagcagagaaggaagggactgtagagacaaggacactgtagtgacccctaggactccagcaccatagtgtgtagctgagttgtattgtcaccatcgtccccagcttcccacctacatttccatgtactaccgcgtgtgggcagactccagtcactagtcttgcttcatatgcttatttaactcattttgcctccagatggcatatgcatgagacatctaggtgacagttggtatcattaaaagtcattaagacccaaggtctgccctaaaagggttataatctggttgaattgtcatatgctatagtcacagccaaggggaccatgcccctcatattcaaagacaagactgttgaggtgaagtgttctgtcctggactgtctatgtaacccaatcttattcagtcctcagcccttatctccatagaaaactgagccatggacagactaggtaggattagacttgtccagtgtttgattccttgtagtccaaattcatatttgaatctaggatcctctagcctgctacactgtaaaagtaaatgtcacattaaaaaaaaaagaaaggaagaaacatagcccaagcacagatatacatatatagagctatagacacaggtattgctgagacaaactgacaagcacaccagccactacactaatacaaaaatgacacaaacacacaacatgccattctctctctctctctctctctctctctctctctctctctctctctctcatatatgtacaaactccagcttgcagcagaactaaggatcacatacaagtacctcctgtgtttatgtttacaaagccttgacccggactacactaatgaactatagtttcccaccctccccagagggaaagttctccctgctgagaggttacagaaggggtcagagtcaaaggaagagcaaaaccctacccctcacctggacaataaattcattcagagagtgaaacatgtgcataagcaaataaaagcatgcaatcatcatacacacccaaacacatccccagacccacaaacatgtctccctggcacattctactcctccttccccctctgagccaggcatatgcacccttttggtgtgttctgtctctgtctctgtctccgtctccatctccgtctctgtctctgtctctctctctctctctctctctctctctctctctctctctctctctctgtgtgtgtgtgtgtgtgtgtgtgtgtgtgtgtgtgtgtgttctggtccctcctcttgccctgactgagttcacactcctagttctcaagccccgtgccaaagtgggcagcaccattggttcaagaatagaggagctactatgctacttgggccttgccatgatctgatcctgacccactgagtgggcccagccatttctgcacccaggatgagtgccagctccttcccactttggaatgccaacatggatccctctgagctgcaatcccctcagccttctcccctgccaagtcctgtgttccctactcctgtagtataggtgtctgggctccacccccaaggttccccattcttctactctgttcccagtcagccgagtaggaacagctggtccagacttccatctggagggatcaaagagctgagaccaccctcactctcgatatatgagatccctagtggcgtggatggatatagctgtgaaggctggagatagctgcagtttcagtagacagatgtctgtagactgagtgcagatgagcctagggggccagaggtggttagcaccaggtgactgcctctgagtcaccgggttgagcaagaggcaaatttgaagaacaggtcatttatgggtttgactccctccagctgagtgaggtgaggagaaacaatggctaatgcttactgaaaggctgctttgtgctgggcactgtgtacacactacacactctgctcattcagtcctcaccacagccctggaagcaaagaactgtgcatacctctgtgttaagaccaggaaataggcattgagaccttgtgtaatttacccaagtttaaatagcaagcaaactagtactcacaggcaaatcaaactaacttctgagcttacatcttcggaacatatttctccctcctatattgtaacctggacacattgtgtgtgtgtgtgtgtgtgtgtgtgtgtgtgtgtgtgtgtgtgtgtgtgtagcacagagtggatgctctgtaaatatttattgagtgaatgaatgcagtggggaagaggaagcaatgagagttgtgtgctgtgactttgagggaaagaacaagagtgaattccatgcacacataccgaagactggcttctgactctggggtctcagcccctcacaatctcctaggtgagggaagagctctaaagaagaacaagagtgaattccgtgcacatataccgaagactggcttctgactctggggtctcagcccctcacaatctcctaggtgagggatgagctctaaagcactctggggtggaaaggcttctctctcttttcccctccaaccagaacagaaggcagggaggtgtgaggggaggtgtgagagggggtgcatagccaacccatccagcttaaccaggctgggatcctcctgcgctctcaccaccctctgcctcagtccagggtcttcctcagcctctttcctgccaggccctgcctgttctacttgtccacctggactccataggaggccggtaccccttggctattctggctaaagagtggacaattccctttttgcttgatccaactgaaacaagggtggaatttttccaaaggctctctattaggaaagtaaaggaaaaacaaagccagaaataaaaactgcaaaaacaaagaaacagatggaacagtgggggtgaatgagctggccatgggagtgagtgtgagttgggccccaatgcttagacaaccccccagtatgtgtgtgcgtgctctctctgtctctgtctctctctctgtctctctctctgtctctctgtctctctctctgtctctctctctctctctctctctctctctctctctctctctcacacacacacacacacacacacacacacacacacacacacagcacctgtcctttgcccttggatggcattttccacatggaactgtatatacagagcttgtttcaatctgtctccctgtcctgaatgagctgctcagggtcactgtcaattcttgctctgcctggcaaggcctagaagttcagcagacatttacagagtgactgagctagtgagtgagcagtgaggggtgaccgtaagaagtcggtcttttctctctggttaacccatggcctccacagtggacgcttctgttttccccgattctatctcaccctgaccacttccacccacaaatgaaagtttctccttctatttcagaactcaaacttctgtctttcagaaatcaagtcacgcagctccctggacaacctacttagggcaagctctgtgctccaaagagggaacgggctagactcacgtccagctgaaaaagaaatagcagtctaaaagtcagcaccttggaaatcaaggctagaaaataatagctatgttcattgtcttccatgctgagttagtgactgtgtaacaggttcagaaaacattgtccaaattgtggtcagtctaagatttattttctgagcattttgactccatttgtggacaagaagctggtgtctggcatgatgtgggtatggaggtctgactagctgccagccatggtgacagggagtcccagtaagcaggcactgagcatcagcacagcggatcccatcgcttgatgttcttggggaaaagagagcagacaaaacaaacctaaaatgtaaggtctgataggtggggcaaggatgtcagggctagctagtaatgctttgggctgatgtggctctcagccagtggccttcatcctgtcactgactgtccctaacttcagtttcgttatcttgaaagtgggaatcactacagcatacagtattgacctcattgtttcctagcgattgtcaggaagagaaattatgataagcgctggggcacattagcagaagggtgggcccagcagataggagaagagagccctctatgtgacggtcctagtcccctaacacccacgctatctcctccctcagttacccactgtcttctttctttgtcttcctggaacagtcatcttggaagagggtggcctgctttgtccccaacttcctcactgcataagcctcctcagtgtgggatgaggggtgctgttcccaggcttgacctgctattaggatgataaaggtcacaccagttacctctgaggtgaaaaaaaaatttaaccagacttcatttcctttggccatttgaaacttaggttttagagtcctttgttttatttctggcaagggttttgttttcagctataggtccttcggcttggtctggctctctctccagtctttgtggcttctctcctccagcatcttctagaccaatggttctcaaccttcctaatgctgcagcccttttatacagttcctcatgttgtgacaacccccaatcgtaaaatcatttcattgctactttgtaaatgtaattttgttaccattaggaattgtaatgtaaatatctgctatgcaggatctctgtctgatatgggacctttctgaaagggtcactgacaccccccccaccttccccaccccccacctccccccatccctcacctccctccacccccgcaaaggggtctcaacccagagattgagaaccaccgttctagacccttctttgacctagctattgaacaaagctctgcctaagactcttggccaattgtcttccagacaccccaccttggtggtctctgcctcagcagtcatctccatgcaaacgatttccgtagcccatgctcagtgccattctccagtcctgtctcaatcactcaaggggctcctcctgcagccctgtcaccttaccacctcaaccttaccacccacacagtgaagttatgtttcctttcccaaacaattttcttccttccctggcttattttaataatgtgccccaaccctcaagtccttcctcccttgccctggcaaacaagcagctaccaaatcctaaatgttcctcctcatccatccctacctcctcacccatcgcccggtcacccacagagctgctacctatcttttccttccagccatacacctcacacccatgcgcgcacacacacacacacacacacacacacacacacacacacacacacctttcaatcaaatgagtctacccagggcacactttgaatgagagtatttctctcctcaaaaactttaaatgtctccatattgtttatagcaatatttttcaaactttcttggtggtaaaaatacagactcccacttcccgcccccgccctcatgaatcagagtctctaagagctgtgcccgctgttctgtggttttaacaagcatccaggtgactcttatcatcacaggtttttatttttcatttttttaatggaacactggcatttaggataacacttaatctggcactcaaggctgtctgtacccgcttccaggatcggcttcacagtctcctctgtgttctggatgctgctgcagcccctgtgcctgagctcacaggggttcctctgtctggactctcctatctatcaagacctagctagaatgccacctcctccatgaagatctccctgattcttccaactgaggatcatctccctctccttggagctaacctcaccctctggcctgagtgcaactgtgtgccctcagcagccatggcagcccggctcacagaagcatgctattggcacttccctcccctttatactctgtgctttcttgtcgccaggaaccttggacccagggatgacccttttccatagcaaggatgttaaatgcttagctactagaaccaaagagactaggtctgaaccccaggtcccctacttgacttagctatttaggagctgtgtgcctcagtttccctatctgtaaaacagagttggtatgcggactaaataacatgcattgtctttggttttggagcctgggaaatccaatttcaaggcactgacagttgccacatctagtgagaacctattcctgattttcgcatagctatggggatactgtacctctccacatggcaacaagcgaagggagaggacacaggttatacatatctgtcctcataagagcactaacctgcatctggatgacacatgcttataatcctagtactctggcagtcaaggcaatatagcactgcaagctgaaacctacatagggagacgcatcaaggagcacccccgttgtgtaagagcctcccagaggccctgtctcctaatactctcactctggatgatggcattttagcctgtgacatagtggggctcagtgtattgattgcttttcctgttgctgtggcagaatgcctggtagaagcaacttaaagaagaaagagtttattttggctcattgtttggaggtgcagtctgtcaagctggggaaagtacagcaggtgtgagagacagctatgtcacactgtgtgcacagtcagggagcagagaggggtggacgccagtgctcagctccctttcttctttccattcagtcctagagctccccccaccacactcatgcagttgtaccacccacttttgctgtggatcttcctgcctcaatcaacctaacctagaaactctcagagacatgcccagaatcaccaagtctcctgggtgactctagagcctgccaaactgacattcaaggttagtcatcacacccagcatacagggaatgctagagctcactcaccatcagctttgacacacaaaacatctcggggacagtctgactcggtaactctcaactctgcctacccactggggagctttggggactctagaggcctgggcctgacctcaaaccaatgatccttgaggtcaggaccaggtctgggatatgaacacaaagctacggtgagagttcttcattttacccataggtggtggaagacttattcaagtgttcttggttcagtacagtgaattctggattgaaacccttccttccctcatagccagtccagcacaacttttaacacaaaggcccagtctttgctcctgtactggtgggatgggagcatctcccaagaggacccctgtggagggcagtaggattggagaagtcggaagaagattaaagaaacggagaggagagatctcaaaggctcagcacccactctgggaccatagagtcaaaggctgggatggggctggggtggagactaaatggcctgggattcgaagcaaaagggctccaagagtgggaaacttgactctctgggttgtgatggtctttccagtgctggcccagaatggggcatgcagaaagagttcaacaagtgctaactgaatgcctcgatgactcagtagcatcagaggcatgcacactgttgctcatgccacatttctatagggaaaagaccctgggaagagaaattgagacacagaggaggccaagctccctggaagtctgcaagtccatcataggagagaggccatggctctgggtgccagacatttaggggcatcctgtcctagtttggcatacagaatgccaaagaagacaagcagacaaatggaactgtatgctgggtgaagaggagggggcatgggaaggaaagaaggcggcaggcaggaaggaggaggccaggggccaggccaggctgcctcttgatagggacagcagggaggtggagagctctgggccagtggctgggtcagatcctcagccaaaacaaacctacctcagggggctggggggccattccttccccacacagatggaatcaaaggcaaacaggaaccctgcagggcccagctgtgacccctgcccccaaactcagcaagacccattaacccctcctcccatctctcccgatgtactctcatcgcccaaagaatcccccaaacagcttcacctggtatttgctgcctgaatcccagccaggagacgccagattccccagccaaaaggatacccaggccctgcccacctccacagtggctctgcataaaatatcaaggtcattttcccttaaaaaacaaaaacaaaacaaaaaacaacaacaaaatataggaggcttttcttcatttctatgcccagagttaaagggtccagactcatttcctagaatcacagtaatcaaagtagacatagctgttccctactaacagaccaggcagaagcaattgctccctcatctcctcccaggccagagtaactgcaggctccttctactgctcccctgaggaggaagtagcccagaattcagggagcattagaagtgaaagggacctccaaggctttctggtacgcctcaggtggaaacgtcaaggctagcacagagcctgtccaagatcatacaagtggctggtgaagccagtggggcctggctttcaggcaagttctcactgcaccagaccatgacccagaccccagacagggcagatgagaaacaggcccagaatactgtggaccgccgtgcccgagagaaccaacatacaaatgttttctttaatctcttcaacacccctacctgtgtgtcccaacaggaccccaatgtggacctttctggagtcagagaagcaaagaaagcatgggtcagaggcagagggaccaatggggactgctttccagagtctttccctcatctttccttaattctatacagcatgatttgagtcatctgaacaggacaataaaaaccatctgggggaaagattaaagatggcaggcgcaggaaattccgaggaagagaagtactgagtacacagaaaagagagaccgggaagaaaacagaggaatcgatatcaaggaagagatgagaagaaaagccacacagtccctgtggtccagtgggggaaactcaggtagcagcgggcctagggcagctatattcccactggcaaggccactgcaatctgagggaatgggagcagaggactcaggagaatgggggaatgagagaatgacttttggggcactaattaaggccaccccaggccttctagacccccaaataatttttcaccccaagatggtctttctttgaaagcagaacagttctcacttgcaccctcagaaggctccagaaacctggcagcagggacaaccagttaaaagggaagaagaaagatgcagggaataggagagacaaggacagtccagggggctggcagcaggagaggcaggcaagagggactggggcagaggagtggggtgagggggcgggagaagggacgtgggcgggaatgatggagcctctcccagctcttccttccctgcctctgtccctcccactccctctttcacgatcttgaaacaaccttcaagtctgggctggaggccccaggaggccagtcacttaggaaacaaaactgtttcctttacaagtccatctgcagctgagcgcccaccctcccccttgcgcactctcccagggactctcacgtacacccacagaactgcacaaccttcactgtagcacacgttcacgcctgcacacagacatgtgcccgtcacacactgctgtgcagatgactaatttgtaataggtggaccacgcatccaagcgagcactgccctttcaccatcaactccttaaaaaaaaaaaaaaaagaatagtctctctcatataatctgagttggcttctcaaccttgctttgtagtttaggatgaccttgaacttctgaccctcctgcctctacctcccaagtattgtgattggaggcatgttctacaagccttggtttaggggaatattagggctagattccagggttccatgcctgctaggaaagcactctaccaactgagccacatgcccagagtgaaactcctttggaattagcacttggtacattcgaacctacataatcccacacacgaatgtcccctttggtggtaagtagcaccccacctctaagctagtacttgttcctgtttctttctgttccctacccctgcatacacacacttactttcccagatctctgccaaccaaacatggttcagaccatctccatcttacccccgggacctttctattctgtgttttctctcaagaccatgcctgccttcctacctcctgctttcccgtctttctgtcttcctcctttgttcccttcttgactcaaatgagtccccatgtctgggtccaccgatagccaacccaggcacaacagatcaaaggaccaggtgtctattcccactgtgttccggagtctgagactcccaattcctccacagagggagtggccatggaggtatgggtgaacagcaggcagtgggtgccctgcctaccttcacttgctgcagtccaagtatgggagcagcagtgtccttgggactgtagtcaccccaatgcagggcatggcagggagccctaagagtctgtgtgagcagaggaagggtacagccctttccgttattgagcctgactggagacagcagagccagggcgtgggaaggactgggcaacactggaaagtgccagcaggggtgggaggagggggaatgaacgcaggggctcagagccttgtgcttctcttctgtctcaccttgtatcttgaagaagctagggagattacgcaggaactctagtccaggagtatagatgccccttgaccccaagggatcatctattcacccctaaatgccaccagcctctggataaattttctacgctttacgtcttcagctgctctctatgtccttgacatgcagggactgtgtccacttcctgtcacagtttcccagtctcatctattccagaactaagcccaaggcctggaagggaccacagaccatgagaaaatccatgcgtgcttatcctgccccatccttcctgcctaggcccaggaggaagcagtaggggcaggtaggatctgccctcggatgactgtaatggaaaaatctcagctgcagacccggagggggccagttatttagggaattcagatgtgagccctgtgccctgagagtagatttcctggacaagaggtctataatccctctacagggagctccctccaggcctggaggggatgcaacccagtcagccaagccagcgggtgccttaggcctcccgccaaagccccatcccctctctccttctttcccagtcagggttctcagacatgcccctgctcagcaggggtgcactcactccatctctgggcctagagaaatggggacactgccggggaatcctgtcctctgactgctcccggtaggtgggggcaggaattttacttctctgtcccccacccttttctttggctcttcatcaaatgaactacctcatcacccccagagcagccgcccctgtttctattgagtataatgctgaagacacctgccctgctggaggtgatgccccgcccacttctccccaggcccaacttccgggatcccccatgcctccttatacaagtcactctcagtggagatgcctaggtcttcctcccagaaggagctcaaggaagtcattgttcttcctagtgcctggacttggtatttgaggtgataatgacttccatgctctcctcagaaatgccacaccttccggatttgacttcctcccatgccattcaccaacctcagactcagcaaaggaggagaggctcttccactccacacacagaatggcagagatgctaccaaaggcctgctgagcctggcttagggctgccttctagtcttctgtccttcaccttcccaccagcctctaggtgccgagagtcttgattgtcctgaatgctggatgccggtctggccaacttttaaatgttgtgacacaaagttgtcatctacaacattcacatcatctaggagaactatgcaatgatgttatcaaaaacaaatgaccactataaagtacctcataatgtctgaagtgaactcaggatgttgtgttgggccaaatccatagctatcttggggtgtattcagaccaaggacagcaagtcagacatgtctggctcagaggctacatttgggaggccttaggaggaccctctctccatctccagacgtcgggccctggtaagggctcctggtaaggagcacaagtcatcttgtgctctgcttccaactctctttgtcacagtgtccctgcagcttccacagcagggggaccaggctgttgctttttctgggaaattggatgtggactcgggagattgtttctgccttatctactcagattgccaaattcttatcgcctcagcttcctcacctggaaatataggccgttagtccgtaagacctcgggcatcctatcacctgagctgatgcctccctaggggccacatctctgcatctcttcctcctgcaaccccctcctctttccctctctcctccctcgctctctctctctctctctctctctctctctctctctctctctctctctctcctctctctctctgttgtagctgccactatgggatagggaagtgctgaggggagctgagggggggacacaggacaaaacaggaccatcagccagggccagtagctaaagggggcgggaggggaggagtcctcagggatccagtttcaacaaacgtttctttccccgagaaggggaaggcgggggtgagggggagagggacctatttaaagctaccctgttgctcaggctgtctctgtctgtctgccagggtctccagctgccccagacaggcggtgtggtcttgggatcctcctggtgaccttttcagcctaggtcccctcagccactctaccccaagatgggtcgtggggtgagtatccccaaagatctggggccgctctctggagggtgaggaagacaatggagaaagggttggggtgggaatgggatgtggagggagagtgagagacgctgactgagtgggatggtttgaacttggaactagtctcccaactgcacgagcgtgtggattccaaagtgctagcccaagtactgtcctctcctgcagccaccctggcctcctcctctcccacaactagcccagaatccacccaagtgcccttctagatctccctgcactcggtctcctcatctcttctccccaaatccctcctctctcaccacagttcttggcttctcagctgaagggacgtttggcatggtcagttctctcccgccctcattacccactgaaagtatctactcctctgaggtcctagccagagaggacaggggccagcctaggattgcaaagcagctgtggaacaccccactcccagagccaccaagcagtttgctacactaactccaagagccctccctacatgccagtgtcaactgagagggagagcaggcatctatccccaaccctcaccccagcaaccctccggatgtccccagaaacactgtcctcggctcctggccataggctttggggtcctttccaaaagctggtgaaaactgcccgtgcccatggcatcctgaagcaatggatttgccaacaaaaagattaatatccatgtctgtgcgagcaaggacaaagtttccaattcttggaaatgaaattcctatatgaagaaaagtgacccaatccctttacataccatgctcggccgctttccttttgtggaatgctggcaaaagagggcacggagggaaaaggtttgacaaggcattgcaaaatgtgagggagacagtgccacggggtgctgtgagccaatttctgggcccaaggagaagtcaggcaaggacatgttattgctctccgctcaacagctggaaaagctctgagcctggccaccaggtttccagagttagggtgggaactggaaataaaagagctgtgcttgcatacatgcatgtgtgtgtgtgtgtgtgtgtgtgagagagagagagagatagatagagagagagagagagagagagagagagagagagagagcatgtgtatatgtgtccacaatctcgaacccctgtgctcccagaaagctgggagtactgcaggcattcatgagtgaattcacactatgtttcagcaggtgaattttcaaatgaacagcctttgggcattcagaggtatagatggagtaggggtgaggactgtgagcccacccttaggagctgtctatggaaggaagtggtcatagtcacaggaaggcataatatcctgggaccttcagcaatatctcctttggtatctcctgctccccatagaaagggaaagaaggtccagctaaggtgcagaacctctgagatgtcagggccaagcaggtcaggcaagccccacctccatctgagagaaaagagagagaggatacacccaccccccactctaccttacagcaaggtggacctagctcacagtgttctttctacttgaaaagcaatttgagtggggcagtggtggcccatgtctttaatctcagcactcaggaggcagatataggtggatctctgctagttcgatgccagcttggtctacagagcgagtttcaggacagactccaaaactacagagaaaccctgtctcaaaaaaaaaaagaaagaaagaaagaaagaaaaaagaaaagaaaagcacttggaccttgaattccccattctcaacttccccccagcacccttgctgggtcgataacatgtggctgtgagcaatgctgctgctaatctggtctctttggtttagaaagccaggttaagtttgggatcttaggttgggagctcagagtcctgcctaccagggaagccagccctgcggaacacaagctcccattctccacactccactctggggtctgcttcacctccaccccagcccatcactgtgtggctgtgaaaggcagcgtgggagttgagggaagaaatcacactggtgggagggagccagaggctgaggtgggggggtggggggagcgttggctgatttccagctacccccactctgtcccagactctggctttctcaaaaagaactctctgttctcctttagcattcaagacccaaagagagagacttgtgctaatggagggagagaagagaaggggagaggggggtccccgcttcctctttctttcttccctggacagccactggccccaaatctcggcaggctcctggctgtggagcctgagatccttgccagggcaggaggagggggaagggcagagtgccccaagctttgcacttaagggacaacagggctgggggtgggggcaggggcaccacatggagctgtttagctcagccacaattcaacatgccaacatgcaagagccagtgcacttttccccagagacatgcatttgtttatttgtttgagatgggaatctcactatgtagcccaggctggatttccagtcctcctgccctccacctcctgaatccactcccagctccagaagagggcatttgatcctcattttcacgtatttgattttacaccaaatgtgcagagatttctctgggctctgctcgttggcccccagcacatgcctttcctggaggaaggctcccatccctgaagcccccaaagatcacactgcttgtccagattgctttcttgcattttcggtccttttgtggtttcccatccttttactcagccctgcctcaccaaagagaccaaagcctttcaatccacccaataaatgaagcctcttacagcccctgggaaagggaggggtagaatacgtctgagtacttctctaccctgccaatggccacttcagtctccccaggatcaagacaggactggattcacaggtgtttgagatagaggagagagcatgatatattggtcaccttttctaaagagagcatgtctgagcaacacagccaccaagggcacacctccttccatctaggtccttgaatcctggatcaagtgcccatcatcttgtgttgtatcttccatccccttccttgctcttgatttcactgggcagaattctgtaattcatggtaccaagtttatggtttcttatgatcacgacagctgtcatgttccccaggatggctctaactctgataggtgaaaatacattatcccagagcccttaggacttggagtagcacagtcacatgaaaagggaggtccacagtgataaacacctgcctaaatccgcagaaggaacactgacagcttgtcagccatggccagtgaggaaacaatgtaacactccaacaatgcagagacggagactgtcggtgcctaggcgtcgggagcacatcctctacttgccactaccttctcagtcagctaaaaagctgcttttaaaaagaactactaaatgggtttcagtgaggaaacctcggaaatctacaggacctcctgtagttcagtacttatccctagcataggtgtggactttgggagcccattccacatagaggaatactccctgagccaagacacacaggggtgggcctaggctctatcccaaaagatatgatagactctgatgataccctatggaaggcctcaccatccagggggagcagaaagaatatataatagatagggttttagttggggggggtggtaggggaggacgggagggacaagggaactaggattgtcatgtaaaacaatcttgtttctaattcaaataaaaaatgttataaaaaacaaaacaaaagataaataaataaataaaaagaactcctaaaaatgaaccccaccccccaatgcataatcttgaaaaacaaaacaaacaaaaagcacacaggctaatatttctaccagatacctattctttatggaaagcaccagtcataaccatggcatagaaaaacccccttcttaaagctcagggtagccttcagggtccatagaaaagccagaaacttagcaggagctgcagagccatggagggagatgacagaatttttcacactatccatacataaccccctggcctttcctagccctccattcctccaagactgcctccatctaaatgaagactccacaccatctccttcaagaagctcctatgagacccccaaagcctgcagtagccctgaagagaagggcaaatgggacctcaaagatcactattaaaaacacccagctaggccgggcgttggtggcacatgcctttaattccagcacttgggaggcagaggcaggcggatctctgtgagttcaagaccagcctggtctacaaagagagtttcaggacagccagggctgttacaaggagaaacctgtcttgaaataaataaataaatagaacaaaacacaaacctggacagaagcccaagactggcccggactttgacatgacttcagttctctgtctcctctcatataccatctctttttctttctcttgtttttgtatcgtttcaagggtttctctgtgtagctttggagcctgtcctagaactcactctgtagaccaggctggcctcaaactcacagagatctgcctgcctctgcctcccgagtgctgggattaaaggcatatgccaccaccaccctgctacatttattttttaatgatttatttctttttattttgtatgcattgttttgtctgcatgtatgtctgtgtgaggggggcatgccttggaactggggttacagacaattgtaagctgttatgtggatgctgggaattgaacccaggtcttctacccttctagaagagtagccagtgctcttaactgctaaggcatctctccagcctccccctacacacacacacacacacacacacacacacacacacacacacacacacatttcttgacaaagagaactcagctatgctttggggtttcaagttctgtgagttgcctttgtccagtcccgggtaagcctgcccagcaggctggtgagggctcccagaataccctgagctcccattttatagacatacttgaaccttgtcaccattagcttctcccagtccatcatccctacccattccattgccaccaccaagccagcttctcttagcttcccgggactcctctctaaagtaggcaaagacattcctacaggataccctacccatcaacacaatccctggccaatcccaggattctctcaaataacataggattgtgattttcaaaatgtgtgttttctttattgtctggcagaatcctatatcacatagtaaacagataataagttcaaatgtgggggtcctcacggctctgcctgggctctttcacttcctgctcccattctcccccaccaccctgcttcccatgctgggacatcctcaatggctgtgggaacaggctccagctagtcccccgatcatctgtgccctcccttcctgttgcaggcagggcgtgagtactcgcctgctgccaccacttcggagaatgggggtggcaagaagaaacagaaagagaaggagctcgatgagctgaagaaggaagttgccatggtaaggaccacagtgctttcagcagggccatggaagaacagctctgctttgacagtcacacaccagcagccatgggcatgtaaagaagctttgtacacaggcctatgctcctcacttccccagtgtgtgcccagccccccccccttcccaaaagtgtctccatccagtgtgtgtgtgctcagccttctttgccaaagggactccttttccccttccccaggatgaccacaagctgtccttggatgagctgggccgaaaataccaagtggacctgtccaaggtgagtggagccacgaggtgagagaagcagacagatttaggtgggagagcctcaacactagaccacaatgctctttgcaggtgagggaagcagcccagagatgagagacttacccaaggtcatgggattagttggtggcaccgtcagaaatagattttggaccccctgctttctcctctttccctgtgtatcgggaagctaggattccttcgaacccagggctcagatcccggcaaggatctgtgccctgcctggagccattgctcgagatgactcacccctgttaccatagtgcttgcctactctcccgctgcaccatggctctgtaatcagatgcagtgtggccatttctttaatcctcaccctagctctgtcaggcatggtcagcctgtttattaaagcaaggagagtcagcaagggaaatttacttgctgaatttgtaaccaggctgacactcctcacttaatcctgtgccccaaagtgtgctcagcctccttcctttccctcttctccaggatgaacgcctcctgtccttggatgagctaggttatataaataaacacaggccatagtcagattgccaaatgcatcatttaaaaatattttaaattgttcctcaaagctaggtgcactggcacatacctgtaaccccagctactcaggaagctgaggcgggaaaattacaagttcaaggcaagagtggacaacttagagtccctgtcacaaaattaaatcaaagaggtcttctgcacgtagttcaatgacagagtgccatgtggcttgtgtaatgccctatcaatccttagtttaaaaaaaaaatcttccaagtgctatggtggtcaactgtagccctaggtacttagcagaaagaacacttgggcccaacaattaaggacaaaacattgaaatcctggctccaacaaaggaaaacactgtaaagccagccacaatttcaagttcaaggctagcttgggctataaagtcacttccaaggtagaacagtaccttgtcttaaaaaacaaacaaacaaccaaaacaaaaaaactaccgtgctacactcctttctgtctctcttcctaaactgttacgctgctgggattagaggcatatgtcatcaccacccggctatgctctcaatctttaacgctactttattttctatgcaggtttcctctttagattgtgggtaaggctttgttgatcgtgcctgtctctaaatccttcccagtgcagggcatgtagtcggagctcaatgttcatgtattaagtaggtcagaatgacacggaggtcatttgaggagtggatcctcctcaaagtcagtaacaaaaaagtttttaaaaaaaccacacaaacagaattccagtgctatctagtaagtaccactctagaatcaaacaaacatggggccacctggatcctgaaagaggcctttggtctggcctggcgcataaagaacagtgagcttggctaggctttctttggaaagtgataggtggttgccaaagtcaaatgacactaagggtcaaggggggggggaggtgatggacgaccttccctagagccctggtgaagggaaggatgtgcaggaagagacgagggtggtctgacaaggaatgtttctttccggtgtgtttatgcttgctgtcccaacaaaaacatgtttcaacccaagaataaccgaaggtggagccacagcgagagtcctttctagcctcaaggcccaagtcccatttctagacaccagctcctctgtgtggtccctacagatgttcccaccccttccgaccacagataattcccccgccagctggatgttactctccaagatgctgagagatgcggtgaggttcaggtttgttccgtgtacccactcctacgccttctctcactccatagggcctcactaaccagcgagctcaggacattctggctcgggatggacccaatgccctcacgccaccccccacaactcctgagtgggtcaagttctgtcgtcaactttttgggggtttctctattcttctgtggatcggggccctcctctgcttcctagcctatggcatcctggccgccatggaggacgaaccatccaatgataatgtgagccacgcacgcaacccctggaccagtcagcccatggctctgccctccaattctcaaccccaaataaggtgaagggggggtgctcaggggacaagatcacagtcccagtgtctcaggatgaagagagctgaggcttctgtacgtacctgtggagcaccctccaacacatgcagtcagtgatgcagatagttcatccatacttattccactaaaaggggctggtctgtatgcctggaccttcactcctagaaaagcctcaggcatgggaactcgcttctttgcttcttccatgctaggagagtgagttagaagactgggggtgctggagagaaagatgcactgtcattctcatgcctgggctcagatgaaggctggggaatcccacataggatgactcttgagtgctcatctcaagtgacagccaccccttgaggtgagaaatggcaggtccttcaaactctttctccttaccagttatacctaggtatcgtgctagcagctgtagtcatcgtcactggctgcttctcctactaccaggaagccaagagctccaagatcatggactccttcaagaacatggtgcctcaggtagacgccagggactggctccatccagcttggggcgtaagggttctaggatggctcacctcttactgtcttgaggtagaagagagatgggcagacaacagccttttcagctctccacaccagaaccaagctttattgctgaagctatgggggtttcacttctcccccttttgagggggagcaacagagtggagagcaaaggtggaaacaaacatttcctgaggtgctcctggcctctccacagcaagctctggtcatccgagagggagagaagatgcagatcaatgcggaggaggtggtggtaggagacctggtagaagtgaagggcggagaccgtgtgcctgctgacctccggatcatctcttcccacggctgcaaggtgaggaggttgccaagagcaactggttgcatctgtacagagtcaagagaggcctcttgaaagcttaaaagaagcccaattgcaaacatcagggtctccccaactcaacctccttccaggatacacgttacctctgtgtatctgtgttagggatgctctataccctgggatttctttcatatagccacttcatagccattgtatatggaataacatttgtgtaacagaagccttgcatattccatccaatttcactctgaaagattccagaccagcctgggctacagagagccccagatatcacataaataaaattttaaggaaataaagatgaaggatctgggtcttcacacctgttatcttagcactttgcacgtagagcgtggagacaggagaatggaaagttcaaagtcagcccagcctggctacacagagaggtgtctggaaaacgatgatgtaattatgaaagctgcggtatgttgcagcctgatcaaccccaggaggcagcattttcatagactgccttgttggtggtgcttctggagttgtgcaatgcaatgatcttgtttacattccccactttacaggtgaacaagtgaaggccttgtgggttaagtaaataacccaaagacacattaaagtcaggaacagtcagtcatccacaccaaagaaggagcaatagctgagtaatgccataaatatgtgatgagggcaaatgtaattttgtccctctttgtcatgaagattgagggtggctggatctggctcaggagacagctgtgtgctcacagtgctgctgctgctgccagtctgatgactacaccccttcctcctcaggtggataactcatccctaacaggggagtcagagccccagacccgttcccctgagttcacccatgagaacccactggagacccgaaatatctgtttcttctctaccaactgcgtggaaggtgagaagctaacctcccaagaacgcccctcatcccagcacagtgcggggaaaggtctgactcccgaagctgtacttatttggcaaaataagctctgtatataaaggacattgagggaacaggacgctgagcatggcagaaatagtctggagagcagggcattggccaagggcagacagactctattagaagtcacctctccccaagaagctctctgttctgtccatccccagactgaaagccttccacaaaactttcagatggtgggtcaagatgtgtcccccacacagccttgactccttgaatgtggggagtcacataatgccttctaggtctgtggttctagaccagcttcttccttcctcagctggtgatcagaaacctgaggcttaatctgggtcaggaaaactttgtggtgaaaatcaggtcctccttcaggctgcatcatccacctaggccatgatgagaagaaaattctcataatgtgctgtctgccctggctgttccatctcagttctgggttctagtgatgagcactggtggcgaatgagagctctgggatctgttatcacacaagaataggagcctaagcacaactacagcccatactccatggtccagccagggagctcaggcagggctggctctgggaaagagtctgtggaaggagatggtaggagagaggtttcctagaccacggccctctcacacagtgacaaagaatggcttcttgcatcccaactccatactttcctttccctgagactttctctcctccatatattggttctctgggcttggtttgctcgttcagagaattggaattacaataaaaaatcactacacattaaatttcctaaatttttaatgtactgagattctgatttatcatacatttcccataactgaatgtatttgaaaggtcagataaggtgttcatattgcttattcagcagctagctccaaagagaggagaggaatgaacggaagtcacatttgttgcctgcctgctatgagacagacactggtcaaagtgcttccacagttatcctatttgactactgactcctaggtaggagttcaaacaggcatcaaacccagatttggctgacttaaacatgcgtgctgttcccacggcaccacacttcctttccttaagacccctgtaatgtcacacatggcgaatgattgattaccttacttccttaatagagtttcatacctaacattgggattttttaaacaatttactttattttatgtacattggtatgatggtgtcagatcccctggaactagagttacaggcagttacaagctgccatgagggtgctgggaattgaactcaggacctctggaagagcagctagtgctcttaactgctgagtcatctctccagcccccacattgggatttttttaattaaaaactttcataattattagtgtgtgtgtgtgtgtgtgagtgtgtgtgtgtgagagagagagtgtgagtgtgtgtgtgagtgtgtgtgtgtgagagagagtctgtgtgtgtgtgtgtgagagagtgtctgtgtgtgtgagtgtgtgtgttgtgtgtgtgtgtgtgtatgtgtgtgtatgagagtgactgtgtgtgtgtgagagagagagtctgtgtgagtgtgtgtttgtgtgtgtgtgagcacactcatgccacagtgcacatgtgaaagacttgcaggacctggttcttttcttctaccatgtgagttccagagactgaactcgggtcgttgggaatagcaggtggtgcccttacacactgaactgtcttgctggcccaagaaaagctccccccaaaatcaataagtactttccttctgtttataacatgctcttgaaaaatgtctagtgtaagattgattgctgaaatattgcaggcaatttttatttcatttattgaatctcttcaattgaagctttagtattacttgcaagatgtcttctcaggctcaaatagaaaagagaataatttgcgactgtatttaatctgagattggtgatctatgaagggaggacaagcctggtttcctaaaagtagccttcagggatagagtctttggcttatttactctgtgatggttttatttccttagcaaatatgatgagatttcagtcatcggcaagcccagggcacttattctctgtcctttcctctatttcaggcactgccaggggcattgtgattgccacaggtgaccggacggtgatgggccgcatagccaccctcgcctctggcctcgaggtggggcagacacccatagccatggaaatcgagcacttcatccagctgatcacaggagtggcagtgttcctgggggtttctttcttcgtgctgtccctcatcctgggctacagctggctggaggccgtcatcttcctcatcggcatcatcgtagccaacgtgcctgaagggcttttggccactgtgactgtgagtggatcaggctgaagtgccaccggcgccactgtccttgtccttctccccatttgacacgaacgaagtcactcattgcttttcagcaatgttcttgccttcaagtccctgcagtcatacagcagacgctgtacacagaaatggtttaatgcgtgccttggagttctaagttgaaaagttgggggttgagctgtatctgagcattgtttccctttggaggcttgttatggtcatggttctcaccatctgtgtgcttgtctcctgatgcagtctggggttcatcctgtctcactggctataaagatgctttcaaaggtcaccagtgactaactagcaaaaaaaaaaaaaaagagtgacatttctcagctcccatccttaaccctgctgctgaaatggatacgtctgtccacccccttgcactctgtccttcaccagctactgtgatgtgtcaccatcctggttctcctgtcctgtgtcctcacagaaactcaatggctgtcaagccccagaccctcgctcttttcctctttgttgcccacaaaggaatccatttttctccacagcttctgttgtcccttctgtgtaggtgactctcacgtctttgtgtctgatatggactcatgtgttcaactctctgctgggcatttactacaaatgcacctgggagccagttcaacatgcccagtgttgaactggcactatttactgctaggtcccacccaatcttatttgtaggataaaggaaaaaggaattagggcttcaggaaaggaaatggccgtggacacccgtcactctagacttggacctttttgttctcctctctgtgcaccaggtgtgcctgacgctgacagccaagcgcatggctcggaagaactgcctggtgaagaacctggaggcggtggagacactgggctccacatccaccatctgctcggacaagacgggcaccctcacccagaaccgcatgacggtggcccacatgtggttcgacaaccagatccacgaggccgacaccaccgaggatcagtccggtgattgggtgctctagaaagggtgtagggaagtggctagtgctgagcttcctggcagaagagagagagactagggtgtgaaaacactcgaacagggagccaagcctctcccttgtttcttcccaggggccacttttgacaagcggtccccgacgtggacagccctgtctcggattgctggtctctgcaatcgtgctgtcttcaaggctgggcaggagaacatctctgtgtctaaggtaaggggtcaatcagtgagtgcagacacatatgtgttggggggggggtgtctccaaagtccccttgctgacgcccagctttccctctcacaccctgtagctgcctttggtgacctcaactgatgccctgtctctcccatcctgcactccctcccctccagccactgtgacattgaattctattttcttctggcagcgggacacagctggtgatgcctctgagtcagcgctactcaaatgcattgagttgtcctgtggctcagtgcggaagatgagggacaggaacccgaaggtggcagaaattcccttcaactctactaacaaatatcaggtctggctgagctgctgggacacagaaagaaagaggggcaaaaatgggtagagagagagaacggagactcaataagagaaagtgagccaacagagactcaacaggaagaagggatgagaatatctgaggactgtgtgctctcgctcctgcctcactcccaggacaaatggcctggctgcaggtgtgcttgccatcatcctctgactggcaaaccttaccacctgtggcctgtcaccatctcgctcctcttctggtagccctcatctccattcactggcgatgacgctacaatactgccatccatataactaaagcacacgtccataattctcttactgcgtccctcagtatttaggtgcctgttagtaccaatagtctcagctctcctctgcttgcactgtggaggtaaagtccctgggtcactggggaatagggggtgctaataagagccatccaaccaacccctagcacaatgcctgtcctcagtgatcctaataattatttgtcaaatgaatcactgttctatggaagtgactctcagattttaaggcttgggactataagcaaacaccttccacacatagtttctcctttgttgacactctttgatgggttagagttatgttttttttgtttagattttatttattatgtatacaacattccatgtatatctgcacaccagaagagggcaccagatctcataatggatggttgtgagccaccatgtggttgctgggaattgaactcaggacctctggaagaacagctggtgttcttaacctccgagccatctctccagccccctagagttatgttattaaggaacataagagttatgttactccttctcagaagctgcttcttatcagaccctatgctaagccaccaggatagtatgtctctcctgtgactgcctttctcctctccagctgtccatccatgagagagaagacagcccccagagccatgtgctggtgatgaaaggagccccagagcgtatcctggaccgatgctctaccatcctggtacagggcaaggagatccctctggacaaggagatgcaagatgcctttcaaaacgcctacatggagctgggaggactcggggagcgtgtgctaggtgagcgggcagaagccagagcagggctgagaagggtgggtcctgagtcttggtagtgtctctagcataagggcccctggaggtgaccaggaagccactctgctgctctcattcctccttcctgctcctcctcaggcttctgtcagctgaacctgccttctggaaagtttcctcggggcttcaaatttgacacagatgagctgaactttcccacagagaagctctgttttgtggggctcatgtctatgattgacccacccagggcagctgtgccagatgctgtgggcaagtgccgaagtgcgggcatcaaggtaccggcctccttcccatcctcctcctctgtccttgtatgcctgaccacctgccagaggtcaagggaccgcaacagctgtgtcctgaggagacctgggctcctggtggcctccttcccagtgacacagagaaactgtcctgcagggaaaggtcctagtgagagctcttgcttcttccttttgcctgctgcgcctgtcacctaccccagctcaccaccccgcctgcatgtgcacccttcctttctcactctaagcatcagctggcactcccattatggctacttggttgtctgactgcccagctgctcagtctacccattggcatagggactagtaaactcctgtctgtcccaacaagctttccttgtcactccttactctccccactcacccacgacttcccactgagttcctgtccaaccacaaccacttctcactgaatactctatcttatttgtttggcttgttcttcatccagcaaatatttaattgcttaccaactgtgcatcgggcaccatgcaaagtgccaagtttattaaataacaaaccaaccatccaggaactcagttccctatttccaagacgggtccctgacatcctcttgttctgctcaccaattctggtgccatgtgttgctcttcctttttttgaacaatgaaactcaacctgctccctgagagttgagtctttgtagccctctgtgcctggccagttgagtctttgtagccctctgtgcctggccagttaagtctttgtagccctctgtgcctggccagttaagtctttgtagccctctgtgcctggcctccacatctcaagatctctcgtgggggtagatgcttctaaacacatcaaaaacagtcttaagagttgaggtcgatgggcagtggtggtgcacacttttaatcccagcactcgggaggcagaggcaggcagatctctgtgagttccaggccagcctggtctgcaaagctacctagagagaccctgtctcaaaaaaacaaaacaaaagagttgaggtcattgagtatctattgccccaatgatacattattttaattttttgtatgcatcagacactgctctaaacgctaagcatggcagccttctgggtaagcccaagtatcttccctgctacagagagagaaattgaggcacaaaacagcaagccgaagaccacatagacagtaagttgtaaagtcagaatttgaaacaaggcagtctgtctcttaaccaccacaccagaagacttgatgccatgtacgtgtgtcagttttgactataataaccactcagaatggaaaacaggcattattacctcccactgcaatacacaaacacaaagaaactcagagtaggtaaatagtttccccaaaatagaactgttggtaagaggtgaactgggaatacgaggcacagttggcttgtctggaagccacactccttctttctgcccagtcaggtgcctctcagcatgacgagaaatagcagaggctgggcaaggactctatggaaaactcacccgagagctgttaattctgcctctgagaactagacagggtttaatagaagagatgatatttgacctgggccctgaaggctgaagaggattcagcaggctataaaggaaggggaggcatggcaagatcagggaacagctagtacccggacatgcccacactatcaggaggtgggggtgtacaggtcaatggggagagatgacgacagaacactgggaattgggactcaaacattgggtcaaggccagttggaaggattttctttaagtgccagactcgagccttatcctgtgtgccacagatggccacaactgtcacagatatagctgtaaggctacctagtggaggagggactagatttgaggaaaagctgaggtctggaacagggagacagattagaaggtacacaatcgtccaagcaagggatgaggatctgaacacagagacaaaggcagcaaagacacatagttacattcgagggtgggaagatagaggagagaacaggacggagtgaatagagcagatggtatctaagatgagaggagctggaggggggtgcagggagaacagacaggagtgcagcatggaccttaagtttaaagcatctgcaagaaacacacacacacacacacacacagagagagagagagagagagagagagagaggctattgagggacagtagtaatgtagaaagcgggtcaggactggagatttaaatctcattagcacatgagtacaaactgaaggcttatcaggatagtttattatattgttcaggaagcaaacaagagtcaaggaaagggtgaagaatgaaaccctggattcaccgacatttctggggacagggagaaagaggagccagtgggggtgggtaggacacagccaccatttattgagtgtctacagaatgccagcctgggatggtgtggatcattccctccattgtgctgaaatagaaaatttgtcttgtctaaggtccaacagttggtgaaggtcagtgttcacacttaggttcctgtccaaagccagcaattactccactctgtgaggctccattctgccaccccgaggaggcttgaaagaatgtgcagcagggtaggggtacaactggagcagaaataaaggaggtgcagaaaccaagggagtgaagggcttcaatgcctgagagagtcgaggccggcgaggtgtgccgagacacttgtttttcaatggaaggcactttgagggtggtttcaggttataatgagggtgggagagaaggcagccagtgggcctgaagaggtgtctggtctcagatctgtaggacttcttccacaagcccacatatggaaatctgtcctcaaccagctttgatcactttctgctgataacagcctctttccaggcctactcgcttcccatgacactccatctatgctgcaatagtaatgaacattaattatcacggcttaggcaagaagtgccttctccccgtaccaggcagggctgttggaagctgatgagcatggcagcagctggacactgtcttcatcttagcaccactctatccaaccaaaatgctacattgatcacatgagacactgggaaaatcaaacctttgtttagggtccctgtgaccttgaagaaatcacgagtgctcacaaaattgatctcctttactatattcagagggggcagttaaaggttggagagttagtccagcagttaagagcactctcgggctgctctttcagaagactcactcggcaactcacaccgttcacggtattaaatgccctcttctggtctccaagggtgccaggcacatatgtggtacacagacacacagacagacaaaacacccatacacataaagtaataaaaggaggaggggggaggagctgtaagggataatccatccagctttgactgcctcatttcccacatagccaaactcctcaagaaatttcccagacaacccgggcatagtaacatatgcttataatcccagcacttgacaggcacggacaagaggatcctgcaagtttgaggccagcttgggctacatgcctcaagatcttgtcccagagagagtagaggagacagacagagagagagacacacacagagagagacagagagacagagaaaaaaggacaaagagagacaaggagacagggttagggagaacacacagactctcctctgccaagggaccctcactaacccatcaatctgctgtggatgtttctggccctttaaataggctctctcatcctctgaactctgaaacaaacacagtttgtcaatgtctcttgtccttaccaccaaaccttcacacacacacacacacacacacacacacacacacacacacacacacacacacacctacctccatttgggaaaaggaatgagagggggaactcaacgctgctttctttttgtgtcttcttcctatcaggtgatcatggtgactggggaccaccctatcacagccaaggccattgccaaaggtgtgggcattatatcagagggtaacgagactgtggaggacattgcagcccggctcaacattcctgtgagtcaagtcaatcccaggtaaggcctttacaaagaccctcacagaggccctcagggtcccttggggatatctggacagcatctctggaaccctcagactaaaatctttcctttgccagcccaatggccatttccccagacaagtttgtgtccagcctgtaccactgacgagctgtgtaaccttggaaacgtctttgcagtcctgaacttccattttctcagttatgaaattaagatgctgtccacatggcagggttgctatagggatgagctatgcctagcaagcagcacttagacttgtgtggtattgcgtggggaggatgtagtattgccttctctcagagaagtagtggaactcagtgtcacagaagagggcacaaaagcaatggcagagtcccacctcacagaggaactaaggcacacgggtgtgggggggagcagcaggattggcatgagcatggatggtcagctgtctctgcctctaccctccagagaagccaaagcatgtgtagtgcatgggtcggacctgaaggacatgacgtcagagcagctggatgagatcctcagggaccacacggagattgtgtttgcccggacatcccctcagcagaagctcattattgtggaggggtgtcagaggcaggtgagcaagacggcgaggcgagcagcgagcgacaaagtcaggggccacacaggcaagcactttgtcctcaagcacctttggcgtcttcccctcagggagccattgtagcagtgactggggacggggtgaacgactcccccgcgctgaagaaggctgacatcggcattgccatgggcatctctggctccgatgtctctaagcaggccgctgacatgatccttctcgacgacaacttcgcctccatcgtgacaggcgtcgaggagggtgaggaagctgtgtgggctgtgtgacatccaggatgtctgaagccagacctttggcttcctctgatcctcacactaagattccatgctgctgcttcagctttaaaccttcctctttgaaaaatgagcagccacacacatctcagggcctggggcgggggagagttcctctaacctctctgatgccctcagaacctctccacaggtcgtctgatctttgacaacttgaagaagtccatcgcgtacaccctgaccagcaacatccctgagatcaccccctttctgctgttcatcattgccaacatcccgctgcccctgggcactgtgaccatcctctgcattgacctgggcacagatatggtgaggccagagggtagagtacagtcagaccaggcactcactcagaacaggggtagggtgagcagcagacaaaggatctgcgcccggggcatctgaccagaccccaaccaatagacagcagataagcccaggcctggaggaaaacaggaagtttctccttaccaccctgtagtatcggggatcgaacccaggatgcactcatgctaagcaagtgctccacccctaagctatacccctagtgataataggatcttaaataccggtgtattgcattctgttgactcttcactgagcagctgttgctcttgtttcccagatctcttcagtcaccttctcctccccatgtcctctgtacacaggttcccgcgatctcattagcatacgaggcggctgagagcgacatcatgaagcggcagcctagaaactcccagacagacaagctggtgaacgagaggcttatcagcatggcttatggacagattggtgcgcccagccaggggctcgggagggtgcccccaaaagcttcttctaatgcctgagagagatgagagaaatttcgggaaagggtccagctccctgagagccagcgacttccatctctgttcccgagaggtggcccctttcctgcctctttccctactcaggtccctccttctgtttacaaccatctccaggcatgatccaggctctgggcggcttcttcacctactttgtgatactggcagagaacgggtttctgccatcacggctgctgggaatccgtcttgactgggatgatcggacgaccaatgacctggaggacagctatgggcaagagtgggtgagtgccgctgtgtaaacgtgatgcaggctgagggcaggaattggccaggatcgagctaggggcagaaggtggattaagtgccaagtttaacgactgcctaaagtgtgctgtctgctggtactgcctatcccttccctcactctttccctctctcggcgtgcctcctgcccagacctacgagcagcggaaggtggtagagttcacatgccacacggccttctttgccagcatcgtggttgtgcagtgggctgacctcatcatctgcaagactcgtcgcaactcagtcttccagcagggcatgaagtgagtgcctaccgctaccactaccgctaccactaccactaccgctaccgctaccactaccactaccagtatctggttgtaataacctagcgacttatccacagccaggtttgaaacacacacacacagagagagaatggcaagagcctttctactgaattctaacattgcttctaaagtaacctgccatggctccctacctgcatattcacccccttattttctctcaccctcttcctcttccgttccctatctgagcggcacctaggattatcctttgcccagttctaaacccagggccaggtctcctgtactccacacaaacacttggcacttgacctaccgttcttcatctgcccagggggcatattcaggccttcctatggtgtggtaccatgtgccaggcagtgaattaagtgcctccctctaatcccacaacagctcttccaaggtgggtttgactgtaccctgcgtgggcaagaaacccccaaggttagctgataagggccttcagctgcccagggccttccaggtccatctccaccccacaccgtagtagctcatttgttatacatctggaatctcattcactggtgattttaacacagatggagactgcatactgaaggggccaggctggtttcttgtttgtatttatttttctcaccagaaacaaaggccactgttccccaaatgaaatttgtcccagagcatctaagaaattaggcacagtcctgtgccagatacttacagggcagcatatgggtgacacgagaaagtggagatgaaaccaaactgattaactcagcccacccaagaggcaaataaagaatcaacgtgactgtggctaagtacagggaagaagtattgatacccacaagccacctggccagaggcagccttagtgtgcctgggtctcaccttctgtccttgggcagttgaaagccctcagagatacctctcagcagtatttcaaaaagccacatgaacaaagcacttactcataagaaactgccaggttttctagtaggtcatccttgggcaaaccccaaaaagacagcgatggcatgttaacccagttccgctgggactccatgaatattcataataaactttaatgtattcatcacttactaccaagtgtaacccgagagacaaaaatcatttaaaatgtgggctgtgtggtagaaaagcaatgagatatccctacgtcctcttcagacatggtccgatgctttatgtgaccaaagagagcttgtctttttatgtttattgtatggcgagaagaagcatgaggctcgaagaaattaagcacgctttaaaccccctcccaaagtcaggaagtggctaagctagccatagacttgacaggtctgattccagaaacccatcccccacctttcactcctctccttcccttctgctccaggagcgcccctggagctctctctctagacgcccccccggccccgcccccacatactaactgccttctttgctttgcttttctaggaacaagatcctgatttttgggctcctagaagagacagccttggctgcctttctgtcttactgtccgggcatgggggtggccctccgaatgtacccactcaagtgagtgtctcttcaggtggctaagggagtggtaggaacagagaaatctccggccctttttaggatcaaggctgtctaattcactttgattctacttttgtgacatggtgccagcctctgaggcccctgatgtttccctccattgttttcagggtcacttggtggttctgtgcctttccctacagtctcctcatcttcatctatgatgaagtccgaaagctcatcctaaggcggtaccctgggggtaagcacttcctctttgcagacagttctgaccctaaggtcccaaaagccctgagcaggcccaaccctcccttcctgtcagatcctaaatcccacctagattaacgtggttcttcagggcctccaccttcctccagaacagtggttctcaactttcctaatgctggacccttcaatatagttcctcctggtgtagggaccccctcaaccataaaatttttttcattactacttcacaactgtaactttgttactgttatgaatcacaatgtaaatttgtgacatgcaagatacctgatatgtgacccctgaaaaaatgtttgttcaacccgccaaaggggtcctgacccataggctgagaaccactgctctgagatcacagaccataaaattagaagggcctttccaggtcatctaatcacctacacattttgctgataagaagatgctcggaggtgatttattcgtttaggatcgtaaggcaaggaatagcaactggcaccagggcacagggctcctgattctcaggcatcaaccaagggtttgtttattttccctggaaacatttttgatcaattgctggtttgaaatggatgacctacaggccacacatggtccatgaacagtgtttgggttgagtggcccaatattttagatgtgtggttttctaatggacccagcatctaaaacttcggtgctttcacataaactctgaaatctggttcctaaaacaaatgtaaagagctgtcagtcctcaactgcacttcttcctagcgccagtgggacagctgtttccttagacacttgctacctggggagcccaggagacattttcagcatctaatgaatgaaacacaagtctcccctgtagacaggcttgtcccctccctccctcccctttaaaacccacaaggtgagggcttgtcccttctctctgccctcttccctaggcgtctccttccctctgacctcagctattgaagcccttggggttggtcttttgcttccttttatgctcctgctgcaacctttatcctgtctctctaacaggctgggtggagaaggagacatactactgagctcaccagaaaaaggaagaatgggagaaattggggtgctctgaggtgttgctggggtggtggagagaagggctggagaaaaactggggtggtacttcgggggaagatttgagggagacagaatgaggcaaccgagtgaactaagttggcaggcttgagtaaataaacttgaggtgactgttccataggtccaactgtgaaccctcagtctatgtcacagtcccctcctcagatccctctcatcccactctaccatgttctcccgaagagctgagggttaccccagcccaccctataccccagcccaccctatacccagtcctttactctcacctgcattcttcaaacagataatgcccaaaggttaattctgtctaatccagaaggaaattctcccaaacggccagccaggtgctcacatctctggcttcattcctcttcccattcttgccttctttagcttcctacctgagtcttccccttttcctccccctcagaccttgaaaacacaaaattctccttttgtgagtccaagagcctggggccagaaagggaagctggttggggaggttaggagtgtctcccagccaaggccagtcaggaacctagagaggagagctgggctaccaaggagagattgggacttgctggctgaagaacacaaacaaagaaaaggaaggcaagtttgtccccttgagtctccaggtaggtgggatgggctctggctctgtgtcctgcctttataggctaacacttgagcagatcaaattcccatcttgtcagactagcagcaggggcaagaccaggaggcagtgtgccaccaggtgcctgactgacccttgggtggtggtcctctttgtccacaaggctcaggtgtcatggaaggtccagctatctcaaccacatgctcttggaaacacccctctctttagaacaatttcttaagctcatcatgctgttctgattccctaattagctctccccctcaatccccttcatgcctgtcctgctgaacccatgtcatttccagtatggcttagctgatcctggaaaaggatgtcagaaactttagacacagagaaaatctgaagagaatctgcctttgacctctcagatgccagggccaccactcccaggcaagtgcccactttccttgagacaggaagctggcttcaggttcctatggaatagagcttgtcttatgttttcccttctcacctaacatttttgctctgtggacagctgcccgttctctcaacctgccctaaaaagcattggatagctggacctagatgagtgaaccaagcaagtgatagagacagcaagaaaactggaaggcctagggtggaaccatgaaggacaagacaagaattaggccagacccaaagtgccccccccccctgcaagggcttactgtctcattgcagtgaacttttgctttatcataagtcatggccttggcctggaagtctaaataggacaccatatttatttgggcctgattaatttgagatcattgactttgaacaaaagtttacctttgcacaatcaataaagaagtcatttggtcagtaaattaagagcataaacagtattgctgggagtggcatatttagtctgtctccaagtttgcttttcaggcactttagaagtctccctttagaatcagcaagtgcataggctaattatcatcagtcctcatatatttgataaaggaacatctacaagatccttactggtgaccctctgtaagactttagcttgaagtactacatatgtacttgaaaataataaagttgcatttctttatgaaacaaaagagaaatgactccatggttgatttcttcatacttgcctccctctcaatagcggtattagatgtgtgctgtgtaaggacttggcttgcaaagtgaacccgaagaaagggcaaatgtctggaatagtagggaaataatctggccacagacatgggtgggggcggggggagctgtgaggaaagctgaaagggaagaagttaggtgcaaaataatctagaagaaaatgtagctgggtgttggtggcacacgcctttaaccccagcactcgggaggcagaggcaggcggatctctgtgagttcgaggccagcctggtctccagagcgagtgccaggataggctccaaagctacacagagaaaccctgtctcgaaaaaccaaaaaaaaaaaaaagaaaaaaaaaaaaagaaaatgtagtcagagccctcttcctcatgggcagtcccaccaggaagccaccagagtttatccaggagaggacacaaagcctgtgggtctctgacggtctatgagatgcacagccatttctgtttcagaccaaaatcagcccacccccaatcttagaggcatggagtggaggtgttcagtccacccccaatcttagaggcatggagtggaggtgttactcggggcctctgcggccaagtctgcactgattagcagtctatattgtactcaaagccatctttaggggatgaagcaaagcacatacagcctggaaatctacctgagtagattttggcatcttcttgcacagcatgtgtgtgatgggcagtacggaggggccctctgcaccgaaatgggaaacacctgtatgatgcacattcctgtaggaatcaatggggatgggagatggggagacactggctcttacaacctacaccagaatatcaaaataaccatgagaagtcagctgcagcccaagctatgtactgccccctttgttacaacccctcgctgtggtggtgatggtaggtacttgtcatcctagcagctgtcgaagtgactgcagctcattctgtgcctttaaagtaccagttttcaccaggcagtggtggcacacgcctttaatcctagcactcaggaggcagaggcaggtggatctctgtgagtttgaggccagcctggtctacagagtaagtttcaggacagccaagctacacagagaaatccagtctcaaaataaataaataaataaaataacagtttttgctttaaaagttaagaataaaaccagattaaagcttactttgatctccccttgatggaccctctcccaagaacacttttctttctcgtgcctagctttccagccttcattcagacattaacttagataccacctctcctgggaagcgccttcatacctgcctcgggcagctagcattcctggcatttcttttctattgtttgtttttactcataaatgctaactcaaatttaagtatgaaatggatgctagatggctagataaatatatattatagtatatgcacataacagaggctagagagaggactcactggttaagagcgctgaacactctttcagaggggaccagggttcaattcctggcacctacatggtggctcacagctttctgttactgtaactccagtcccagatggctcaacaacaccccccttttcggcctctatgggtgctgcattcatgtggtgcacagacaccacatgaatgggtgcttgcaggcaaagcacccattgtcttagtcactgttctatggctgtgaagagacaccacgcccaaggcaactcttacaaaaagaagcatttaactgggagatgacttacagtttcaaaagggcagtccattttcatcacggcaggggcatggcagcttgtaacaggcatggagaagtagctgagagctgcatcaggcctacccccacccactccccacccacccatccccatccccctcaccccccacaccccaccctgtgatacacctacttcaacaaggtcgcacctcttaatccttcacaatagtccaccagctgagaaccaagcatgcaaatatgccaacctgtggggactaatctcatggaaattaccacaccatacacacagaatgcataaataaataaataaataaattaattaattaattaaataaataaaataaatagagacccaactaccttctagaggatctagaagtccagaaaactaatgacagcagctatacctttgaaaccctgagaaagaaattagcgcttaaaaaatgcaagcaggtctttcactttttggttatcgttagcccaaggtattttatgttgtttgtgacaattgtaaagggtgatgtttctctgatttctttctccaccaatgtgtcatcggaatatagcagggctactgatttttttgagttaatcttgtatcctgccactttgctgaaggtgtttatcagttgtaggcgttccctggtagaattttttgggtcacttatgtaaactatcatatcatctgcaaatattgaaagtttgtcttcttcctttctaatttgtatccccttgatctctttttgctgtcttattactctagccagaacttcaagcacattgttgaagaaatatggagagagtggacagccttgtcttgttcctgattttagaggaattgtgttgagtttctctccatttggtatatattacttttattatgtttaggtatgttcctgtcatccctgatctctccaagacctttatcatgaagggatgttggatttgtcaaagaactcaagaagctagtcaccaaaacaccaaataatccaattaaaaagtagagtatagaactaaatagagaattctcaatagaggaatctaaaatggctgaaagacacttaagaaagtgcttaacatccttagtcatcagggaaatgcaaatcaaaacaactctgagataccatctcactcctgtcagaatggctaaaaccaaaaacaccaatgacagtttatgctggagaggatgtggagaaagaagaatacccctccactcctggtgggagtgcaaactcatactgccactttggaaatcagtatggtggttcctcaggaaaatgggaatcagtctaccacaagatccagcaattgcactcttaggcatatactcaaaagaaatacattcatgcaacaagggcatctgttcaacgatgttcatagcagcattatttgtaatagccagaacttggaagcaacctagatgcccctcaactgtagaatggataaagaaaatgtggtacatttacacaatggagtactactcagtgggaaaaaaacagtggaatcttgaaattcacaggcaaatggatggaactagaagaaactatcctgagtgaggtaacccagtcacaaaaagacaaacatggtatgtactcgatcatatatggatataagatataaagcaaaggattaccagcctacaatccacacagcaagagaaactaggaaacaaggaggaccctaagagagacatccatggtccccccagagaaggggaaaggaacaagatctcctgagctaattaggagcatggggggagggggagttagaaagagaaggggagaagaggaggggagaggaggacatgagggagcagaaagattgagtcaggggaagaatagaggagagcaaaaaaaaaaagagataacataatagagggagccattataggtttaaagagaattctgacactagggaaatgtccagagatctacaaggttgaccccaactaacaatctaaacaatagttggggggctaccttaaatgaccttctctgataatgagattgatgactaccttatatgccatcctagagccttcatccagtagctgatggaagcagacacagacacccacagctaaacactgagcggaactcctagaatccagttgcagagagggaggaatgatgagcaaaggggtcaagaccaggctggagaaacccacaaaaacagctgacctgaacaagggggatctcatggaccccagactgatagctgggaaaccagcataggactgatccagaccccctgaaagtgggtgtcagttaggaggcctgggcaatctatggggtctctggatcagtatttgttcctagtatacgaaaggactttgggatcccattccacatagagggatactctctcagcctagacacacggggaagggtctaggccctgctccaaatgatatgacagacttttaggatcccccatggactgcctcactctccctagggagcagaaagggcatggggatagggtttgtggaggacaggggagggagggggaactgggattgacatgtaaaacaagcttgtttttaatttaaatttaaaaaatgaactgaaaaaatgcaaacaggagctggggaggtagctatcaattggcaaagtgctccacacataagcataaagatcctgagttcagatcccccactaagcacacatataaaaagccaggtatgattgcatgtggctgtgatcctaatgccaggaggtgcagacaggaagatcctgttgcttactggccagctagtctggctgaatcaggaaattgtatgttcagtgagaggtttttccccaaaaagtcaggtgaggagtgaccgagaggacaagcacatccagcatgcacatgcacccttgaatctacacattcatgagcatttacacacacacacacacacacacacacacaaaatctacacactcgtgagcatttacacacacacacacacaaaatctacacactcatgaacatttacacacacacacaaaatctacacactcatgagcatttatacacacacacaaaatctacacactcatgagcatttacacacacacacaaaatctacacactcatgaacatttacatacacaaacaaaatcaacacactcgtgaacatttacacacacacaaacaaaaaaatctacacacgtgaacatgtacgcacacacaaacaaaaaaatctacacactcatgaacatttacaaacacagaaacaaaaagctttattagctaggagtagtagctcacatctgtaaatcccagcatttgggacattgaagcagaagagccacacatgtgaggcctgcctaggctacatagtgaaactgtctaaaaaacaacaacaaaaaagagccaaactataacaagggaaaaaaaaaaacattgttttttgaaagagcacaaggtgtataacaccaacaaagactgtggtgatttggatgagactagtccccatagactcacatttttgcatgcttgatccctagttggtagaactgtttgggaaggattagatggtgcggtcttgttggcagaggtgtgtcactgagagccttgaggtttcaaaagtccatgccagttccagttagctctccctctttctctgccttgtggttgttgcttcaacaggtgggctctcgctactgttccagggtcagacccgcctgctgccattgccccccccccccgtgatgatcgtggactctaaccctctgactgtgagccccaacaaacctttgctttataagttgacatggtcatggtgtctcttcacagcatcgtgaaagtaactgagacacacaaaggaacagcagcaacaacaaaaaagccatggaagctggaagcgcaaagttacaggatacaaaactcagtcaaatgcaccttgaaatactagaaatggaaaacagaaaacaaaggacttgttttcacaacagaatcaaaacaaatcgtgctcgagtcttaatgtgtacagcctattgtgttaaagaaaatttaaaatcaggatgacaaaaataaaaatgtgaatacatgggggactaatcctggcagctattcaggaagactgaaggtgtaaaagataagttactctagaagagtcaacccaatatcagcccaaggcttcactgtattttcataaaacgtaactctctgtttgtgaaattcagccgtaatggtaaccaggcaagattctgagttcttaaagggtaaattaacaggtaagtctgcttagcctatttaaccaaacaggttttaaacacttcaggcctcagttgacttcattatcaaaatcttataaagatggaatctgaaactcagccttcatttgatttcgtttcgggaaccatttgtggactggctactctgtgccaggcactgctccagagactggatgtccagccagcgaaggttgtggggaatgggcaattagcaagtcaagagataatgggcaggacaatctctgagggtcaaagtgctgtgaagtgatggatagggctggccagaggcactactttgtactgagccatcagaggtttctctggaaaggtaagctttggggcctaagatctgtggatcatgatgagctttccaaaaacaactgaatgaattatgtcccctcagcctgcctctgggaatctcccaaggttcacatctaagtgcttcacagggatgctgcataaaaagaaactttgtgatttcaacttcagttccaaccttgtacttatttgtttatgtttaaatatgtgtataagtgtttgcctgcggtgtgaatgtgcactacttgcatacctggtgccaatggaggccagaagagagcactggatctcctggagccgcaattagagatggctctgagctgtcacacgggtgagcgctgggaactggctgggtcctctggaagatcagccagcgctattacctgctgagaagtctcccaccacctctaaccttaagacttttatgattggcattaaagacaagatctcattaggaaaggaaatagaatagacatttgtggatggatggaaggcggctggaatgggagaatcaagtgatgggggagagagagagagagttgtgggaggcaatatgggaagagacagctaaaattgaggggcatttgagaggtagtatggaaacctaatacagaagaaactttctaaaatgcatgcatacatcaaggtgatataaatgaaattgccaaattacggaagagacagagtcccaagtgaccatctcttgtcatcaaatgaagctttcagtaccaggagtgggttacatctaattgagtttttggccaaagtggacccatgggaacccccagaagcccaggctgttaccaagactataggttgttccccataaactgacagcaaagccctattgctgaagataacctgtataactcatagaacgtgaagaagtctagctgatgcctacacagagccttcacctctatgttccagggtctttggttcaggaaggtactccgcaggttatcaaaagagaaatgtaaacaccaagccagcctcaaaccctttgtctacagtgtactcgctgcaccatacattagggcaatggtggcacaaagcttgtaggagtaaccaaccaataactgatctgatttaagacctagtccacaagatagaacccagagccaacactacttggtaaccaaaaacctgagacagcccagggacctagggtaaaaccaaataagactggtctaaaaaaagaaaaataaatatgatgataaaatcattcctaatgccgttctgttacactcatagttaagtactttgttcagacatcatcagagaagcttcctcctgcagcagatgggaacagatatacaaacccacagtcagatgttacgtagagaagcggagaccctggaatactcagtcctaaatgagatgtctccatcaggttcttcccctcagagctcaggaaacctcgtggaagaggaggcagttagaggcagagagcatgcgggacaccaaaaatacaaatccctctgagtcaacatgagcaaagctcatatgaactcagactgaagcagcatgcacggggcctgcacgggtctgcaccaggtcctctatgctcatattatggccttcggcttagtgttttcactcctgagtgtgtgaatgagtgggtctctgattcttctgccttctcttgggctcctttccctttgttggttttgttatggtggaggttccacccaaggcccctccctcccccatctccctccaaaccctgctgcatctcagaaagcctgccaaatgatggcccctcccccagagatgctcaagaccattcccacagggtatttaaactccccccacccccacccccagagaatagacaagtggcttttccggtctccctttcccatctcctctctagagggttggaaagccatccgggagtgctgtatccattaaacgtgggcttttctaatttggtttgacttggtctgatttggagtgctgcatctgcagagagacttacaggggtatagagacttttcaggtttgtcttgtccaactttcatctgatagtttttattttatcatttatattttattttgttatttttttaaataaatgaataaatgagtgaaaacctagccactagggtaaaggttaacaactaaactgccatttacacctgctgggagaggaaaaattagttattttccagggactgacactgaatctatcaaccactccaggggcaggctcatgttcaggagcaactgaccaacaaataatggactccactgtattcttgtgtgcttttatctggttatggtttggtttttgtttcttgtttgtttgctttttctttttgaatattgatgtattttgtgttctaggttttgagggttttatttttataatttttttcccctgagaaaaaacttaaagttgggtaggaagggaggccagaaggatctggaaggcattcggggaggggaagaatatgatcaaaatgtacttaaatttcaaaattgtttatataataaaaatgtaaaaaaaaaggctgagaaaacatttgcggtgttaatggcaagagagtccaacagctcaattaaaaaaaaaagaaaacaatgtaaaattgaacaaatgatagtataattcacaaaaaggaaaatgcaatccagaaaacccaccaacatattggaaaatacttacacagacaatcattttaaaaaaatgaaaactctgagacatcaaggtcaccctgtgtggagggtggactttgttccctcttactgctaagctccagagcagtgcccttttaatagcagttggcaaaatattttaagattttaaatgagcttaccatatgattcagcaatggaaatcgattctacagaaatagaggctaaagctacctctaaccagtttgccaccgtggcaatgttttccatggttaagaaaacaaacggaaaatagcctatcaacatctcagccgggggagttactgggcaagccatggccaatacagactatggaaagcctgcaggagctgaaagacaagcttcatgcacctgacaagctgataaatggaaggataattgaatggtggtgtagaggataaaaatgcatctcctcttgggtctctattggaataaacataagaaaaactggaaagacgggcaacgtgttactactgtcagttgttcccaccttggaacatttgtgggaaaggaacaggggatttctgggttttattttatactctgttttgtcttggtttttgttttttgtttgtttgttttttttgtttttgtttttgtttttttttttgagacagggtttctctgtgtagtcgtggctgtcctggaactcactctggtagaccaggctagccttgaactcagagatgcacctgcccctgcctcctaggattaaaggtatttgttgccaccacccagcctataccttttttaaatacaagatctcactatgcagcccaagctggtctcaaactcaaggctctcttggttcatgagtgttgagattattttatttcatatatagcagaggagatgtgtgtgtgttagtgtgtgcatgcgtgtgtggaggtcagaggctgatacagggagtctcctattgccctctacctcaacccttgagacaaggtctcagtgacccaggagctcactgatttagcaacagtagcaggccagccatccccagggatcctcttgtctccatctccctagctcctgtgaacacagacatatatctatcaccacacctggcttttcatgtgggtgctaagaattgagatccctgggcctgcatggcaagctcttcacagactgagctatgtccataaccccatttgttttcttctttttactaagaaggaagacaatctctgaaggaaagagactcatctctgttctggccgggaaggcgaacaagtgtgaaggaccccattggtatgatagatgcttttggttccatcatagccaaaaccacaagcaaccaaaacacagttaaagaaatatctaatgctaggcattggtggcgcacgtgtttaatctcagcactcgggaggcagaggcaagtggatctcagtgagttctgaggccagcctggtctacaaagtgagttctaggacagccagggttacacagagaaaccctgtctcaaaaaacaaacaagaaacaaacaaaaaagaaatatcaaataacagaaatgtatgtgatctcataactaaaaaaaataataaaaatgagctgcttcagatctttttgaataagatgttaaaaataattagcacaatgcactaacaataaaaaaaggtcatgaagaagagtgagaggggcatatgcgatggtttgaagggaggaaaggaaagagagaaatgttgtaattatattatcatctaaaacattaaaaaaagattaaggcataattagtacataaatgtcaaggcgcttagtgagatattagagaaggtaaacagaagagataaacacataatttaattttatacatttattttgtgtgtgtaggtgcatgacataaatgtgtaggtcagaagacgacttgtggaagttggttctctccttctaccatgtgggtccatggggatccaacttgggtcatcaagtttgacaaatgcctttacctactgagtcatcttgctagccaacacattttaaagtaagggaatactgcatatcatgtgggacagttggttttcactgggaagagctgcacatttagctgtgtgtaaaaccattaatagtgaatccaaaatatccactgaccatacaccacaaactgacaggttattctctgtgtggagtaaaggaggcttcttcaaatgttccacttgcgacccttcttttcctgaaaactcgttacacaaattgcatactaatgacatggatgtgcttctttatctttacataaagaattaaatattggctgaatatttgttattgcccaaccttacttttcagagttgatcaatattttcattttataatcaatcgccagtgctgagaacactacttctcataaatacatagaacaaaacacgagggaagtatatctcagaaattgttttctgtcgtgtttctgtaagaacagaaaaaaattgtatgtacaggaaaaacattgagggtggaagtgatggctcagtggtaaagaaacttgctacccacatctgagggcttgagctccagccctaggacccaagttgtcttctgatctccacacatgcactattatatgcatgcatgcaacacacacactctctcttctctctctctctctctctctctctctctctctctctctctctctctctcatctctctctctctcctgtctttagtttttgagccacctaactggagtatccctagcttcagaagtcacaagaccagacaaaggctttgttttagtttttctgtctgatctaaattctttctgtggcagaatctgctccagtcatcctcacccaaagacagaggtttgtgtgttcttgattagatctttcctgagcccattatgatgtcaggcctaggctgttgtcatggcacccacaggacctagggctgggggcacctggcctgcccagaagctcactctcacctgggctcccaccgcacttgccacctgctgggcccccttgtcttcatcatttaggtacccaggtaccctccatgccatctccctctttgcctccaccctctctttcagagtcagcctggcgattccttctctacccttgccactcatgcctgccccctcactgaccttccctttcccacgctgctcagggacccctcacctccaactccttaacccttccttccacttgctcccacacccttgtgctcttggctttcctcccactagatgagccgggccagctatacctaggtcagtcacatcatggagcctgaaagggaacaaagtatagcgatccctcagaggaatgagagtccaagacctagcttgaagcctgtaacactgaataaaaatctgcataaaaggagaaaaaagaagaaagatttagaagagctgaaggaagaagtggctatggtgaggaaacccaaagcaaattgcctttggaacaccccagccttctttctgcctgattgccttcacttcccacctacaggacaaagcacgctctcccttcccacttcctgcttcctccctgcacctgatctgagatcaccatctcaccttgatgactcttctgtcccctcaggatgatcacaagctaaccttggatgagttgagtgccaagtactcagtggacttgaccatggtgagtaagaactgtctgaaggaggcagaggtcctcactgacttgaggccacaaacccaaatttgtacctcttttaccctcagccctgcgaagttccgcaaaactcttcttggaaaagatgaccacaataactaccccagagagaagctacgggtagataggatggttagggtatgcttttgtttatcctctgggcctgtttatatccttaggatttatcaaggtctccaaagagctttgctcaggtagaaataacatcagtatttgccatggtaaaattaaaacaggcaaattttagaagtatttcccagttcatttacaagtaggatagttgctgggaatgtagctcagtgggagagccctgagtgggacgcggggttcaacctctagaatttcaaaagaaagagaaggaaaaataagggtttattataggctggtagcaataatatttttgaccaataactttgtttttcaaaaaattagtcatcttatattttataaacatctttaatatctagctttctaatagaaaaatctgaattctcctatcttttggtatgaaatctattgggatatatcatgaagtctctggaaaacttgaaatgtcagcattctgtcagggtgacagaatacctcaatctgtggtgatttgaatgagaagggccccaaggctcatatgtttgaatgctttgtccccagttggtagaacacttgggaaagactagaatatgtggccttattggaggaaatgtgtcagaggctttgaggtctcaaaagtccagccactcccagttagcgatctctctctctctctctctctctctctctctctctctctctctctgtctctctctctctctgtctctctctctctccctctctcctcttctctctctcttttcttctcttctttctctcctctctctctctcctctgccttatgcctgtgaatcaggacacaagctctcggctactgcctgccagctgccatgttccccattgtgatagcaatggactctaaccctctggaactgagagccccaataaactctttcttgtataacttgaattggtaacggtgtctcttaacagatgtagaacaataacttaagacaaacaatgtaaagaaggagagattcattctgactcatagctctgagggttcagatcatggtctcttggtgccactttctttaccttttggggagggaggtgagccctaactgtgtagccctaactgtcctggaacttgttttatagacgaggctggcctcaagcttacagagatccacctgcctctgcctcctgagtgctgggattaaaggtgtgtgccaccaccgcccagcagcaccactatttctgaggtgtggggaggaaggaagcttgtgatggaacaaagctgcttacctcagggcagatagaaaggtgaaggaagaatcccaacacacctttcaagggtacctttccatggcctccttcctccacctaaattgtctcctaatattcctgccatcacttgggaaccaggtcatttgaagaacattttaagagtcaaaccctaacatctatcatacaaaattttttttttttttggagacagggaatcactgtgtagatgaggctgtcctggaacttgctgatcaaccatccattctcaagaacaagtcaagaagacaataatttagtattgctattaaaagctttgggccagccaggcggtagtggcacatgcctttagtcccagcactcaggaggcagaggcaggtagatctctgagtttgaggccagcctggtctacaagagctagttccacaacagcctctaaagccacagagaaaccctgtcaaaaaaaaaaaaagttttgggccttgagagagtattggtggccccttgtgtctttttgaggagaggctaagggaatggctagtaagtttcagtagattctattgtctcataatataaaggagaaagcacggaagtatgtgcataagactaggatgaaaattatgtgtttatgtctttagtttgattttcccttgtttccacattggacagccaaagtgtaaatgccagtatgtcaccagcatcatggatcatagccccagttaggctggtccaccataatcatttctgtatgtttgttttctgactggagctccccaagagtattctttaatttcatttattaatcgattgattgtacctatgtttgtgtgggggtgtaaatatgccacagcatgcacacagaggtcagaggacaacttgtgggaatcagttctctgcaccctatgagtccaagagttggacttaggttgtcaggccttgctgcatccacccttacctacccattaagccatctcaccagatggagcattcatgatggtattctccgtgcttatcaacctaccaagccccaagataaagaactcaagttcaaatgtttgtaaaccaattcataaacaaatgaacaaaccaaaaaatctctctataggaatgctaaatgataccccttttatacaatacaaattctaaaattctaccttctggaggaagaagccttggaagcacattcagaggcctgccttgggggaggggcaggcttatactgagactctaaccagtatatcctcctttattgtaactttgcttactttccatccctatttattctccacacagggtcatagcctcaaagacgcccagaaaattctggttttaactggaccaaattcactaacccctatccctactattccaaattggatcaaattctgtaaacagctatttggtggcttctcccttctgctatggactggttcctttctctgcttcctggcctacggcataaatctacactacaacgaaaaaaacgaaaaagataatgtgagtttgctcatcttgttctatccagtgtagtctgcgctaagccccagaaactcttgtgttcagcagcctggaattcccgaagtcttttggtccaaatccccaatagttcagaactttctagggaggttcctgatccattttgaccccctacaacctctcatctagaaagcttcttctggtccttggctccctaagaggcattattccatccgttttcccacccagccatcacctcagcactttgcagcccttttttcttactcagaccatcaacttcatctctcactttccctggttcattatctacctcccactaacacactgtctggctgggatttttctgaccactcatcacaatagctcaagtttccattactaggaagctgtgtgtgccagcactgtccctgattcttcccagcccctctgtcctgcaactcagtcctatgatttcctccatccagaggaacttgttgccttagcaatccctgaggatgaagagagagaaaaggatgtgttaatgacactttcttccctgtctccagctgtacgtgggtgttgtactagctgttgtggtcctcgttactggctgcttctcatattaccaggagtccaagagctccaagatcatggaatcttttaagaacatggtgcctcaggtaggtaggacttgtgagggaggatctactgagaggaaatgcagattgtgaccaattatataatcactcagtcctctggagaccgtaacccactgtgggtgccctgagtgaggctggtgatgagggagcctggaaattaccaggagaaaatgtaaaactcaggtgatatcaccaaagaattgtctagtctgaaagtgataaatgaagaaaggccctccccaactcaaataacattctactaaaaacaaaagggagacgctggtgggtaggtgacattaaaatcagtgaacttagccgggcgttggtagcacacgcctttaatcccagcactcgggaggcagaagcaggtagatctctgtgagttcgagaccagcctggtctacaagagctagttccaggacagcctccaaagccatagagaaaccctgtctcgaaaaacaaaaacaaacaaacaaacaaacaaaaaatcagtgaacttgcaaaatgttctagcttaatagaagctaaaaaagacatgggggtatgaatatcctggtaaagatacacgtcctaggcctgatgttgtgctgtcagacaatgcctcaaaagacattttgggtcaggtgaagatagctggaatgtagagaatagatctgagtattgaatcagtgtgaaacctgctgaaactaagcactgtattgtataagagaatagtataggggccaagacgcagctcagcagttaacagcacttgttgcttgcattggctcattttatgtaaacctgacacacaagctagagtcttttggaaagagggaactcagttgagaaaatgtccccaccagattggcctgtgagcaagcctgtggtacatttccttgactgtttgaggtgggaggacccagctcactgtggatagtgccatccctgggctggcggtcctgggttctataagaaagcaggctaagcaagtcatgggaagcaagccagtaaacagcacccctctatgggctgtgcatcagttcctgcctctggaatcttgccttgagttcctgagttccttggataaatgaactgtgatgtgggaagtgtaagtgacataaatcctttcctcccaacattgcttttgatagtggtgtttatcacaacaatagaaacctaagactttgctcttgaagaggacctgggttcaggtcccataccctaatggtggcttacatttgaactccggtttcaaaggattttcaccttcctcttcttctggcctcacaggcaccaggcatgaacacagtgcatatacatatatgcacataaaataaaataaatctttttaagagagagaagataacataattcttagaaaataaacacgaagtgtttagaataaattgtcaagatgcatgtaacttagagatagaaaaggacaaaacaaatgagattaaaagctagtagatggagataggtaaaagttttataggtgtgcttgtcattattttctttactaaaacttttcaggaatttaaaaattattttcaagttaaatttttgtaaaggtttctggaaatagttctacagcagattggagtctccaaatgcttagaggtttagatgcttagaaaatctccaaaatcatgcaacagtattaccatgttctagccttggagcctaaggttttcttctccctttaatgtcaacataatttaaacttttcctccaataagagttttgactgggaacttggagattatcaggtagcactggttgcctaatttgccacgccaaacatggcttttgtctcagttctctgtttgggctactgctctggactgagctgactttagcttgtgctaggtagaaatataaggataaccttattcacttctcgggaacctcagttgaaatgattaggttgtttggggctctggcttgttcatgggagcagaggtgtgcccaggaacagcagggcaaaccttaacatgaaagctttgtttgtttgtttgcttatttttggtttttcgggacagggtttctctgtagcttggaaccagtaaaccaaggctggtttcaaactcacagagatccacctgcctcagcctcctgagtgctgggattaaaggtgtgtgccaccaacaccctgctcatgaaagaatttttttaagcctttctttgtaccacatttgctaatatattatgtcgggggcaggagatttacatgaccaagtctacatttaggaacaaagaggtagatcccacctcttaatggaaaggccaccaaagtcacattgcaaaggttctacagacagcaatggtagcaatatgcaatctgccaagctcctttcaaatacggtggattagaaaggagacagaaatggaaacttttaggtttggagcaggataagcaaggcaggaagctccataaaaatcctacattatcttcctacagcaagctctagtaattcgagacggagaaaggatgcaaatcaatgtaaaagatgtggttttgggagacctagtagaagtgaagggtggagaccaaatccccgctgatgtcaggcttatctctgcacaaggatgtaaggtgaggagatacagagagctgtaggaggtagcctaaggcaatgtgtggttctaaggtatgaaagtatgatcttgttattcagaaccttgagatggtgatgagaatggtttagaagtgagacaataaggtatgggggggcatttgcatttctctgtatgttaatgatatgactgttgtaataggtgaggtggtgtcctcagaaatgaatctctcctctgcttgccttttaacctatcctccttcccaccccaggtggataattcctgcttgactggggagtcagaaccccaggctcgctgccctgattgcacccatgagaaccctttggagaccaagaacatcatcttcttctccaccaactgtgtagaaggtgaatagtgtaccatacacagcacagacccaaaagcagaggtagaaacaaatggcgttttaaaaccttctgtttctaaagattttgtagtaggaagacagttaccaagttggcttctccttcactctggagcttgatggcctttggccaaaagtcaacaccaccatttccaaatttgcctactgatattactaaaaattgttacccagggattgcttatggactacatgacataaaatacaaaatacttagtataaggtctaatacactgtccgtgctctatagctgttgacaattgttttagctgatggagagatggatttatgtgttgaaaattgcacaatatggaggaaagttatccatcctgctagatcattctcctaacttctttttaccttccagaagtttgagttactagaggtgtccctccagctttaccattcaaacatgggctttgtccctagaatgacagtaaggcatccccaaaccagaagttgattctgaccaaaataataacaaaggacttgacatcattatgtcactttctccatcacccttttcccttaaagaaacctaaatataccctggaatccacttgcaaaccattattaatgcgtaagaataaatgttttgttgtctagaaacagctgcttttggctgaatgcataaatgcatatagctacagtgtcaactattataaacatcttttccgattctcacaatatcacacacaaaagtctaaagttcaaagaaattacatgctcaccatatttgagagcatggctcaacagaaaagaggaagattagtgattctaatgcaagtctgtctccaaaaggccatgttctctctcccacttgtccactctgctcagcactgaggttgctaataacctctcctcatcaattcatttaacttgaaaataccgtagtaataaccatgacattcgtggacattaacgaagaatccaaccagaaaaaattgtatttcatggtttgtacacaatatataaaatatataattagttgaatggacagaaaatgtaaactaacaagatttctctaaaaatactgaatttctgctgttacagaaatttttgtattttttgctgagatttatctttctgcagtgggtatttttcatcagctacgtacatgctgtagacaagagggccagggaagagtgggtgacaacactgtttcagttgagaaacaggggtctatctgagcgaaagcagatttaataggcaaacagtacccaaatggagctagggtagaaatagctacattaagctaaataattttgctttttgaaacatgtcaagcctcactatgtagctctgcctgtcctagaactcgctcagtactccaggctggcctcgaactcacagagatcctcatgcctcagcctcctgagtgccaacgttaaagaagtgtgctcccatgtctgcctctttttttttttgcaacttttttatgcatttttatgcaacttgctcagtcattttctttccttagaccagtttccactttaacctttgccctagaccaatttaaaaattagttacataaatacaactttagccttgtctcccagctgtcattgctgtagaccttgatgggcaatggcacaaatgcatctctgtgttcccatgcttctggggagcctgagctctttctctgatgatgcatggaaggtatatgagggaacagtctagcctaggatgcggtatacctgcacttaccagtcttctagtttgatgctaacctaccccacctctagacatatatggaccatttactgtctttcatcttttcaagctaaagcatcccataaaatagatttagatgacattatagccacccacatgcacactatcaacaatatgaaatttgttcagtgtcttttaggtcattttagtattttcatgagggttcgaggtactctgtcaaccagttcaaatcttatctttagggtgctttagagtgtgaccttttccagggtctccttccccacaatactagcctgatccagctgagaactctactcctagactcctttttaacatatttttaaaatttttatgtatgaattgtgtgcctgagtgtgtacgagtcccagtgtattcaggagtccaaggaggtcagagaaagtgatcccctcgaactgcagttatagatggttgtgagccatcgtgtaggtctgggtaccaagtctaagttgtctgcaagagcagtaaatcctcttaactggtgagtcatgtctccagccccatgatcctggactgttgctgaaggtgattctagaactggaggcccccaactactccctgcccccgtgtgggggagctgctcctcctggaccacacttacaattttatactagattcaggaaatcttttagtcacctgaatgtaagaataaagttgagtgcctagcctaccacatacccaactttgttctaggctcttttgaacatatttaatttcatagctttgtaggtaaattatttcttcttcttcttcttcttcttcttcttcttcttcttcttcttcttcttcttcttcctcctcctcctcctcctcctcctcctcctcttcctcctcctcctcttgcttctttagacaaagtctgacaccatgcccacactgtccttgaaatcaaggcaatcctctagcctcagcctttcaaatgctggatttctagtgtaacccacaacatctgggatgtgcttcatcccaatttaagtatgaggaaactcgagtttctcagggaacagagctagttatttagaatgttggcctttctgctttttctatgggtttctttccttggtaattctgatttgaatggtgggagtggcaggcacaaatgtaaagcaagaagtatggttttcgacaatcttgtctcaagattgtcagtgaatgtcctgtaccacttgtgggtaaagtcaaccttctaggtagagagcagagctggaaaagcccagggcacggctgttatggcctgagctacccagcagaggtcagactagctctagccagaaaagcagggagggggcccctcaggcagaatttctcaacttctaaccctgaggactggagggagagctcttagttgtgagcagagaagggctgaaccatgcactgtaggatgtttagcaggctttggcttccaccctatctttttctgtctgcacagaattcggtgtcctactgtagggattccctatcagctctccaaaactcggtccaattttgacactatctgcctcaaaatagcatcagatgagggcctaatcccatgggactctttctactttagattctaatccaagtaataggttgtcatccatacttgtgacagattgactgtcaacttggattcctgtgacttcttccttgaggctctcagaactcagggatgcacttggcctacatttcccatctattacagttgataggctacaagtgaacacccagatgggagacatgcatagggaatggtatgtgggctctgtctcttctctggatggagcttttgcatcctctctgggggtgctatcctccagacaactccatgtgtttccagtctggaagctctccaaatctaggtgtcctggctcccccccaccccccgcccaccccaaagcagggttttctttctctgtagctttagagcatgtcctggaactcgctctgtagattaggcttgttacgaaaaatctttccgccaaaagcctctgagccccactgccacatgtgcgctttatgccagctgcctgcccgagttaggcccaaatgaatacacagaaacttgtattaggtacaaagctaattggccaatgactaggacttctcatctgttagctcaatcttaattatcatacatctatatattttataagacttatcttatcggacgccttattggcgtccctccttgctggtggatcacatcgtgccgctggagcaggagcggaggggaaaagagggaacttcccgtttctccttactcaaatatgagtctccttgctatgtcacttcctgcctggaccaccacttctctactacttctcccagaatcctctttgactcctagtcctgtctaacttcctgtctcattggccaaacagtattttatttaacaatcaataagataaacatacacagtacattccccatcatctcctcttttctgtctaaataaaaagaaagataacttatctaataactgaagaaaactataatcaactctatcttcaactctatcaaagaccacagaaggataatatataaactctagaactgacagagacatctggctacctgggcagtcacccaaatttcctctgtaacgttgggcatccatctttagcccataggccacagtgtcccacttctgacaccattctgttacgataaatctttctgccaaatgccgccggagccccaccaccaccacgtgtgagctttacgccagccgcctgcccgagttagacccaaatgaatacacagaaacttgtattaggtttaaagctgcttggccaatgactaggacttctcatctgctaactcagtcttaactagcataaaatatatttagaagacttatcttattggacaccttattggcgtccctccttgttgggatcacatcttgccgctggagcataggctggcctcaaactcacagaaattcacttgtctctgcctcctgagttctggggttaaatgtgtgcaccgccattgcctggccttgtcttgactttttgatggatgctttaatacacagacatgactgattatatcatttgccattggtaatcaactcagccttcagcctcactcgtctcagaagttgagctgaagttgtgaaagtccaccatgtaaccacttagttggttcccctggcaactccctcttcttgtggctagccaagaacccaccaagagtggccccattaaaacaaaaggttctcttatcacctagggaattccatggcatttagacactctgtgccatctattcctgtcaccccagaaattatgaagtgttgggaaccaactatgacaacaagagattctcctagcaacccagtctaaggattttatttctatgttaatggctggagggaagttatggagacaggcatttcttactttaccatgggtatggtatcacagctttttcctttattcacaggcacagcccggggtgttgtgattgctacaggagacaacacagtaatgggccgaattgcttcactgacatctggcttgacaatgggccagacccccattgctgttgagattgaacacttcattcatctgatcacagctgtcgctgtcttccttggtgtcagttttttttcactctcacttatcttgggctatggctggctggatgctgtcattttccttattggcatcattgtggccaatgtgcctgaagggctgctggccactgtcactgtgagtaaacaaggtggggggtagcctctgggcagacaaataaccccaggagaatcaaatcatgagtatggattttgttgttgttaaacatcttaagtgtaagccattacattcccatacctcctcctcttcagtgaaaggggaagcaagatgcaacagagaaaaagtgcactctgtctcaggtgaattggctgttaaacttggtctcaagtattcattagtttttagagagagactaatttgcaattacagaatcctactggaaaggacttcaaggccatttaaagtcaacctttgagcgaacactgaatgttctctataaaaatccatgaaagataattgtggtttttgtttttgtttttttttcttctgagaatggagaacatagctcctctctttatcagtctattttgctgtttgaccacttggttatatttcactgtattgagcagaaatattccctatttcatcctactttccccaactgaaataagttgattctctgtctcctacgttctagtcccccccccatctcccttttgatgtagtcaccatgtcccctcagattctccaggtaatcttttccttaaccattcttcctacgacaaggtcttagttctttgtcttacagttgtttggggtattctctagttttttttcaatattcttcttaaaatagaaataagaataatgtttagggtatgtttggactagtttttaaaacactgggactagtgactgcaattccacagttggaattctatgcttacagatttttcaagggcttttcagtattgtgacatttcattccctcctgcccaaacttttctgaaactactggaaaaatgctggctctatacacagcgctgtataccataatagaacattacctctctatacggtccttggagagactggatctgagagagaggaagtggcccaggatggaaaagaggctcctgactagaaaatctaaccaccttctggggaaggggcttttgctctatgacagtcactcaggtgaaggaagacaccgaaactcttgccataaagcacatatctaaatcatttcctcagtattctttttgatggtcacaggtgggatgtctaaagactgggctaggataaaaaggaaataaaaacaacaggatttccaaagcaacccattctttccccttttggtggctttaggtgtgcctgacgctgacagccaagcgcatggctcggaagaactgcctggtgaagaacctggaggcggtggagacactgggctccacatccaccatctgctcggacaagacaggcaccctcacccagaaccgcatgacggtggcccacttgtggtttgacaagactgtgtatgaggctgacaccagtgaggatcatacaaccggtgactagtggcattagaagccaagagtaggaggatttggggtgggactgttaggaaaatgacaactccagacaaacaggagagagttggagagtggaaggagaggaggaggaggcagtatttgaatatgaataacctcctgccttgatatttgtttagccttcgactcagtaagtagctggagatgaccttgagccttctaatccctgacctctctctcctagtgtaatcctttgtattaaattctgtttgtttacagttctccccttcttcttccccagggaaaacatttcccaagtcctccgacacctggttttacctggctcgaattgctggcctctgtaaccgggctgactttaagccccatcaggaatccgttcccatagctaaggtaccaagcggaaagaggataccttgatgactagtgtatcactgcttccaaaagtttctgcctctccaccctcagtgattttgtacacacacccttccctccccattctgcctctctccttgagaccacaggtaaaccctatgcccagatggtttcccctgggacttatacaaatccttccgtgcagcggggaacaacaggagacgcttctgagtcagccctcctcaaattcattgaacaatcttacaactctgtgaatgaaatgagacagaaaaaccccaaggtggcagagattccctttaattctaccaacaagtaccaggtacagaactgacaaaggtaggagaacggaggggggcctgggctcgtcaccacagatggggaagcttttgcctttgcctccagttgtgcttctgagcatgctcaggaaagccagcatgccaactaggaggaaagtgcatctcaaggataatgacggtgaagagaggaggaatagttcctagcagaattctcacccatgccacctgcaatgaaagcttatcttaaaatattctctgaggcagaggtagtcaaggctggcttgtaggagtcacatcagagtcatgtacaactattagtctataccagtgtctgctatgccatttgccactgtaggcaaaagactgtgtctgcaaggtgctctgtctccttagccatcaaataccccttttccctccataaagttgtagtgcagccatcagtgaggcagtcgggggtaccagcttgtgggtcatagttttcattttctaaaagtgttgatttatgacccagggaggaagcaggtgggcaagggagaatttaaggaatggtcagtggcacaaacaatgaaatcagagtagctatgcatggtgcttcatgcctataatttctgcattgagttgggggctgaggcagaaggattaccctgagttccaggtaagcttgacttacagtttgagaccctgtctaagaaaagaagaagaggaaaagtcaaagtaacccataggggcagcaagactccaagcctcatttgaagagaggtgagcacagagactctgagtggcctgtccatggccagaggccaaccaggcctgtttgctcgggcaaagaccagacatttgaatgtgtgggcagggctacgatataagacttctaagtcagttttgccttctgtcgtcagatataacaaaataacacagtctatatgtttaaaagaaacctcgattacttgtaatttgtgttggaacactaagagataagtggatccacacttcctgtctaaacttgtcttagtcactttcataaaatagatctctcagatctgcaaataagctgcaaactttattcccatttcttttttctgacacttggtggcctcaccaaccagacaggaattttgtggcttggcagaatgtgagtaaagcctttggatgaattaggtacctctccctccatgcggttaaaaataaaagtcagacatattcatgtcattgttggaatgtccaacaagtaaccgtgttcccccaaattaccttttaaaagagtgcttctgagctcctgagtatcatccacgtggcagaagtggtctctgttacacggtctggggcagagcggccgctgcactcagctccagcaggcctagctctggcagactttgagtgaactactgtaattagcttgctcaaagggcagagactccagtctttgaaaggaatgtgtcttacttagcctgtcagtcatttgcaaagtttggtctcttaccatctctgaaacggaaaaaaaattttttttggctaagtgtgtcaccacacacctttaatgccagcactcaggaggcagaagcaggtggatctctgtgaattcgaggccagctggtatacatagtgagaccctgccaaacaacacttttttgctttgttttttgagacagagtttctccatgtaactttggaggctgtcctggaacttgctcttgtagaccacactggtctcaaactcacagagatctgcctgcctctgcctcccaagtgctgggattaaaagaacgtgccaccacacccagccaaaacacctatttctctttgggggaaggggtgtgtgcatgtgcctgtgctgtgtgtgtgtgtgtgtgtgtgtgtgtgtgtgtgtgtgtgtgtgtaaaatggattccgtgtggccagaagacaatatttgggaactggtccacatcttccactgtcagtccagggatcaagtttaggtcttcagggtttggcctcaagcatctttatttgttgagccatcttataagcccctatttgtaatcttcaatcaaggcttttattccctatgaccaagttagtaggtaagaagcttgggttcacctgagccttttattcagtcaaccaagattcattgagctttgttaatcttacagcttctgcctttaaatgatgttttcccttttaaccacttaagcatgtcttgaacacagctgatcattctttaacaaatcagttgtagccacattttatgcaccagtgctcaccccactcaacatccaggaagtgccggctggcctccttggtgttcccacagttcctttcaatttgctgattttgtctccaacggggggcctttgcaggcagttcctgtaagtcaaaagaggaactctatgggtgccttctcacagatcagagatccaagtgaaaggctaaacccaagccaccaggctgctccctctggttgtgtggtctctgcagatccgtgtcatgaaccttacccttcatcatcaggcatccaaccagtacacagtacatagtcttccttgatggcatctcctgcctgtagaagaatggctacagggctaaattatttagtttgtgtttcagtttcaaagttggggggtttttgttgtttgtttgcttgcatttgttgtacaactagctctccttaaaaacaaacaataaaggggactggagagatggctcagtggttaagagcactggctgctcttccagaggaccggggttcatcccagcacccacatgacagctcacaactgtctgtaatccagctccaagtgatttgacaccctcacacacagacacacatggaggtaataccccaatgcacataaaatgaaaataaatcatttaagaaaaaacaactctcagggaggaactaaggttttgcaggcttgactgaatttagcttagttcacaaagtagataagagacaattctgactctatagcacactggtcttcgagctcacttgaaccatctaatcagcaaggaatcagggagaaaggagagtacccgctatgccctcggagaacttctcagaagatactagattctgctgcagatgattgggctgggttctgcttgagtctgatttggcctggctgaggatgggaggtgggcgtgaagcagttttcctacagatttttgccccgtgtctcccctccccctctggctctttcactgcgtcccctctccccagatgtcaatccatcttctggaagataacccccacgcccatatgctgatgatgaagggtgctccggaaaggatcttggatttttgctccagtttcctgctgaatgggcaggagtaccccatggacgaggaaatgaagacagacttccaaaatgcctacttagaactgggaggcatgggagagcgagtgctgggtgaggagctggggaaggggggtggctttgaaagaatgccatcaaagtgatcgttttgtggggtgtgtggcaggcaggagacatagcatggggatgacttctgggcccttcttctctccccaggtttctgcttcttgaacttgcctagcaacttctctaagggattccagtttgatacagatgagataaatttccccatggagaatctgtgcttcactggcctcatatcgatgatagaccctcctcggactgctgtgcccgatgctgtgagcaagtgtcgaagtgcaggcattaaggtgaattcccaccctccccaaaagccctgcatctcccacaagccagcagaaagcttggctcagagtaggtgcccaatcttggctgaattgatttctgcctccacgagcttactctttggagatgtctaataggaagtttcttccagaagcctgcctccccctgattgtgagaatcaccaagtgtgaaaactctaagctaaaccccaaaccccaggctggctctcaggcatcaatcagtacttcaaaagtttctggaaattctaatgggtgcacaagtttgaaaccactgtcaagcagtgcttcttagaccagtgtgtgaatattctctctctccctctctctctctgtctgtctgtttctctctccctccctctccctccctctctctgtctctctgtctgtctctctgtctctctctccctctctctctctcccttcctccctccctctccctccctctctctgtctctctgtctctctgtctctctctccctctctctctctcccttcctccctccctctccctctctctctctctctctctctctctctctctctctctctctccttttcctcttccttcccctcttctccccacatcgtgattcagcagctctagggcccctggaggttgcacatttgagcatgctcctataccatgctactgctgcgctgtggctataagaggagctgatgttgggatgggaggttaacactgtgaggctagggtgcctggtggctggagcaggcaatgaactatagaactggagagctttctgtgggtctgaccttcagtgatcagctgcaatgacaggtataaacctctgctcctcaaagaaaaactagaaactaagagtgaaactccactacagagcaaacccaaagtctttgatgaggtggatcttgatttcacaggaaggcagcagcaatggaatttttccaattctgagactctgtgtattcatgcttctagtcaaaggctcctcctatcttttttaatgttgattgaatgagtgattgtgtgtacatctgtacatatgtgagtatgggaacacacatgccacaatgcgcatgggtagttcagagaaaatcctttggaagtcactttctttccaccttgggggcttcgggatttgaacccaggttgttaggcttgtacatcaagtgcttgtacccactaagctatctcactggcccaaaactcataccttatagattagatatggcacttggtgctcatactttatattctggatcacctgcatcctctagacttaggaagagctggctagagcagaggagttggaggcactttgggggagtaggtgcttcccgctggagttgctcttatattagacctgtgactgccagtaatttgtctaagagtcatcctgaacaatgcttagctaaacaatggttcactggagtggaaactaaagaaatgacgtgggaaattatgatgcatcaattttttaatcacaccttataaaacctccgaggcagtaagttctttgtggagatgacattattacagaacatcttcatagaataactcatgttgatgcttccccaaagtgctgtaagctaccgtcccgtattgtggaagaaggcattcatctgggttttctgagctttgaggtagactattagaatgaggaatagcgttatgaatgtagtcggcaatttgtctcacctgggaattcacgaatctccttggcaagaagagaaccacaagtgtgccaacaggtggggaggcccaaatagggaccaaagaagcagtatgggtcaggatgcccaacagatcaggatgtcaccacagccggaggcacagcattatagtttgtgaggactcatagggctggccatgagttaggacgcctcaatgctgtctgaacagcccttgtttggtgcctgtttacaagtcttgctacagttgtgtggagtccttctagactccaacctaatgggaagttggcagactctgaggaattgtgaatcattccctctctgggcatggaagaataagacagaaggatggcatcatctttcaaaatgtacaaaatgtaacagacacgtaggagcatgttctgaatcgaagccttccagagccaccatccccctcaaagtggtggtgacgcagagtagatgactgtcacagactactgaataagagaagtcatataattgttgcatggcccccagagtcttttgcagggaaatgattggaggactaagcaggcagcccatgactttgaagcaaatgtgatttaaaaaaaaattaaaaaaatacttccactatattaaccactaagacttcagtagaatgagggtacttagcacattataacgctggttccctctacaaagaagtcgggctttggaagctgtcccaggtacatagtttccttaccagaatttgcaagtttctttcagattgtctggtgtgggggaagacggtagaggggagcatagagtaactggaacgttgatgtgggaacatcccagggaggttggaaattcaatgcttccagaacttgaatcccaaaggcagctggatactctttacttcaaagggagctgttctttgtagagcggcacttctattatatgagtgtatctcatacacgagtgtaagggtgtttagtaaaattgtgtccaagcaactcactcttgaaatagcatcgtattttcatctctctggcttgacacggggggtagtatggctgaagccactagacagcagtccataagatgatcaaacatggtgagacactaggaatgtatgaggccgatagcacgtctagagcacagccaggaaccttgagaaggagctcccaggtagtcaccttcccttcagtcctcattctgtaaatacgtgttgatggcttattaagtgcaggccattgtagcgggccaagggcatgtcatcctcacgaagctctcaggccagtggggaagagatcaccacagagagaagtgctaagtggtgacacatgggaagagcagaatgctatgaaagcagaacaccagaaccccacctttgggtaggaatggggtacaatgagcctccaagtagaaagtgtaggacaaggcaaggcaaggggtagagtaaggctctataaggcctgggtcttggtgaagtttcgctaggcaacagattcttccagacatttcatttttgtgttgttaaaagtttcaaacagcttctggaacaagtgagtggagttctgaattttgcagtatttccaaatcaccaacttcttcctgggcaacatagaacttgaaggatctgggccacatcagctgacatccctgtctccctccaaggattgacggacgccacagtagcacagctcttgacctgtatgggttggaattgtgcttagaattgagctactaaatgggcttttacttagggggtaatggatccagatcttatctaaaactttctccttttccttccccctcccaacccaggtaatcatggtaacaggggatcatcccatcaccgccaaagctattgctaaaagtgtgggcatcatttcagaaggtaacgagacagcagaggacatggctgctcggcttaatatccctgtcagtgaagtcaattccaggtgagacccctaaagaactcagatctgacatttgccccttcagccccagcccgtcccatcaaaaaccatttcccaaagttctggagtctccttcagcaagtaggattgtaggatatacactcgaccaaataaaatatgacagagcagtaacttaagtgattaggccactgagtgttaagaggagacaggaaaaaaaatagaacctgagggaccaaaaaaaaaaaggaaggagtggttggcaaggggagatgaggatggtatgagtcaatttaagggcagtagacactgagggcaaggagactgggtgggaaggacaccagaacttgggggtttagtagagaacactggaacatgacgtgagtcctcaacactctgactagcctttggaaactccttcccttaggtctcttaaagccatcgtcgtgcacggctcagagctaaaggacatggtctcagaagagctggacgatatcctcaagtcctacagggagatagtgtttgctcgaacgtctcctcagcagaagctcatcattgtggaggggtgtcagaggctggtaagggagacaaggtgccctggggaacctgggagagtccagctgcaaacccagcgggggaccaaatgggctgggtggagagaatcccatcctgcctcagccatggcctttagtttggcagttccctgaaagcttaaatagctcaggggaacagaaaacagggctaagcataggcaaataaaacatgactgcattaaaaaatgagatgcaaccaggtggcggtggtgaacgcctttaatcccagtactcggaagtagaagcaaatggatctctgtgagttcgaggccagcctgatctacagagtgagttacagtacagccagagatacatagagaaacattgtcttgaaaaaagaaaggaaggaaggaaggaaggaaggaaggaaggaaggaaggaaggaaaagaaaaaaggaagaaagaaagaaagaaagaaagaaagaaagatagatagatagatagatagatagatagatagatagatagatagatagatgctggaatcaaattgacatttggaactgattctgaatctaacacttttgtctggatttcaccagggatccattgtggcagtgactggtgatggagtgaatgactcccccgcactgaagaaggccgatattggcattgccatgggtatcactggctctgatgtctctaagcaggcagctgacatgatccttcttgatgacaactttgcctccattgtgacaggtgtagaggagggtgaggagacagggtacctaatggtgggacttgatccttggaatggggattaatgtagattactttcattgcctttggtcaccatccaacctcctaatcctatatggactggaaaaaaatcacaaatcttgaaaattccatttagcttggggctgggggaatgtggctatcttgctagattccttacctagtgtgcataaagccctgggttgaagtcccagcactgtgtaaaacacctattatttcatcactctgaagatggaggcaagatgcctggtggtgcacacctttaatcccagcacttgggaggcagaggcagatgtatctctgtgagttcgaggccagcctggtctacaaagcaagttcccggacagccaggacaggactgttacacagagaaacactgtcttgaaaaaaaaaaaaagaaagaaaaaagaaaaagatggaggcaggaggatcatgagttgaaggtcatccttggctacagagcaattgtgaggcctgcttgtgtgacatgaaagaacctatcttttaaaaaaaaaagattcagctaatagttgagggtattctttttttaaggtttatttattttactttgtgtgtttaagtggtttttttaaagatttcatctatttattatgtatacaacattctgcttccatgtatatctgcacaccagaagagggcaccagatctcataccagatggttgtgagcaactatgtggttgctgggaattgaactcaggacctctggaagagcagtcagtgctcttaacctctgagccatctctccagccccgagggtattctttttaaagatgaatttgaaggttttccagattgaccacagagacctagctagattctggcatagcacaattccttctttacggtctcactgcgattcaaagtgtatctaccgcaagttttcagaggtagccataccccgggaaactcagtgcttcagtcttcagcagagacccctaggaacttgttgcctgaattatggggacaattggagattatctgcaaattaacagcatgaactcaattaccctctttccagagaattctaaagagaatgcccattgaaacagaagaaccccatagggccacctgccagacttccctcactgctgtctgaagtgatcttactaaaacacaccaatccatttttttaaaaacaagtatgaatctgacagtttgctccctattttaaatctatttaattcaatacatttttctgagcaccatttgcaatataccatcccaacacaggagacaaaagacagaaatgcctgcccacatacaactaacttggtagtagggagggacagacaacgaacaaggcaaattgcatagtatgggaaagaaaaaaagcagggagctcagggaaggatgacagcgtttggaagggtagccaaggccgcactcagcagtcttgcaaagcagaagtggcactgggagatgtaaggtgagagcaaggtcacaagttaaataaagtggacaatgagattgaaacccaggcctataccacgctcaggttctttccactcattcgtaatctttttttgttttgttttcgtttggtttggttttggtttttcgagacagggtttctctttgtagttttggagcctatcctggcactcactctggagaccaggctggcctcgaactcacagagatccgcctgcctctggatcctgagtgctgggattaaaggcatgcaccaccaacaccgggcctcattcataatcttacaaagactttaatactggcattctcagactcctctgggattaactctacccaactctgcctgattttcagagattgggtaacactagccatggtgactccaagaacaaagagtacaaaaccaggccgtggctaataaatcatggctttatgtaatagtcacacaatttacagacaaaacatggacccccaccaccaccaccaaggtctagaactcccaacattttcgtggaccactcctttctagagttctttctgaccaggagctggtttattggaggtgtgtcttctggttgcttctcatagaagtttggccatcttctccaggtcgcctcatctttgataacctgaagaagtccatcgcatataccctgaccagcaacatccctgagatcacccccttcctgctgttcattatcctaagtatacccttgcctctgggtaccattaccattctctgcattgacctgggcactgacatggtaagcaccagctctcactctgggaattcctaagataggctaagtgtagggaaaaaatctgtcacatgaagggacagagctagaatgtctctgtgtacctatcattcccaccctacatcctccaggtccctgcgatttccttggcttatgagacacctgaaagtgacatcatgaagaggcttccacggaatccaaaaactgacaatctcgtgaaccaccgtctcattggcatggcctatgggcagattggtgagcccagagaagggagaggtgaagggagggaaagggttgccttgactggccatttagagacctctgtttagcagtcagggagatagtttctcaacaacaaatagtgcttagccctgggaccacaaagaactgttgatctctgatctgcccttaaagagctgtgataaagggaaaacctacataaaatggcagcagcgttgtgcttaccacatgctgagcaagaagtaaagacaatgctatgagagcacaaggcctctggctcgccatctttgaagacagagcttctagagagggaacaacttaagactgaagataaggttcgactagtgagcaggtaggcaaggatgctgaaccagcagagaaaggaaattcacagagcatagttggtgactagatggcgtttagtcttgataaggaagtagtggaaaataagactatagacattagtattaacactgggaccaaccttgaaaaacatgtaagaaccatgtaaggtctctgtccttaaccagctcagtatgatggagtgtttcagagagtaatgtagggatggacagggaagagatttgagacagaagaaagcattcaggggcggaaatatatctagacagcagtgactgaggagtcagacccattggaaacctgattcactgcacactgcctcgatggcccagaagttaactgagtcatgtgttttgattttcccacttaaggtgacagttcagaactggaaggagctatgtccacaagatgcacagtgcaaagctctgtaactagtaggcaaatgctactgttacagctattgctattgctcagctgccactctatagaaaggatgaattgataccaaagtcctttttagttttaaaattatttgattcaagggcttgagagatggctcagtggtcaagagcacttcctgtcttgcagtagacccaagttcaattctcagcttctattacctatatctccagttctaggggatctgaagctcctcttctggcctctgtaagcaccatgaaaatccttgcccctgacagggatattaaaactatatgtgattcaagtatgatcctagctgggccaaaacaagactgaaactcagcagggaaaacgccaaatcctgcagctctgtgtttggtgtcagagggggattaaggtggctctgctcttctggcttagagtttaggaacaaatgtcagggtttgaaaccaagtctcttagagatggcacgatcagatagatcagtgatgacaagaatcttcatcactgtgcagatatacactaacctggtagtagcaaggaccatcccaccgcttctatgatgtctttggggacgtcctctgaacagactctcctcccctatggctgtcactcacagggatggtacaggctctggctggatttttcagctattttgtgatcctggcagagaatggttttaagcctttggatctgctgggtatccgtctatactgggatgatcaaagcctaaatgacctagaagacagctacggacagcaatgggtaagtagaaaggacagagtctgaatagtaactaattaggaagtcactcaagtgtggtagtgtaatcccagaacttgggaagcagaggtaggaggattaccacaaattgaaggccatttaggaacatagtaagttcaaggttagcctaggctatgtgctgttaattctttgtctcaaaaaaatgtgtgttcaaatcttagttgttgaaaagatgcctcttacacactgtggcttctgccatttgaacccccatggggccatcagaagttcatgttccgatgatccagtggccagtgatacccaaagttcttactgttcagcatatcaacatctccctaaccctcaaactcaagctattgttttatatgacaagaatttctcttacacactgaagacctgtgaaggaagcaagtgtcaggcagccaaaacaacagcagagcgctcacatctcaaagcaggaggcaaagagtgcacgggggtggcggtggtaggaagtttttgaaacttcaaagcccacccccagtaacaaggccacaccttctaatccttcccaaagagttccatcaactgaagaccaagtattcaaacatatgagcatacattatcatttaaaccatcacattccacttcctgggcaccataggttcctggccatataataattcaaaatgcttttagtcctcaatagtctttcacagtctcaacactgttttgagtccaaaatttcttctgagactcaagcactctaactgtaaaccccagtaaaataaaaaaaaatgcaaattacatacttccaacatacaatgacacagaatattcattactgttccaaaggggaggaatcagtacacagtgaggaaatactgactcaaagtatgactgaaacccaacagggaaaacgccagatcctagagccatcccacttatcagcattgctgcctgcaacttacttctcattcttggactggttctactctctgtctgcagctctgcttggcaggcatcttattgctctggaatctccagcatcttggggtctagtgcaatccaggcttcactttcatagctttataccatggcctcttggggcttcatggaatactttgtcacatgtctggcctcagtctcaaagtcacagaaaaatattctgtaaccccttttgtatccttcatgactttaaagccagcatcatgtggatggcaacttggagtcaactctgtcccccttggatcttgtttgcagcagctttggtttattactgctttttaggagcagagaattccttaggctgtctctttttataagttgggtgcttacctgatgctaactttacacatgggcaccctcactttgtcccaacgcagatcaggtctctccttattgctttcagcaccctggggaaaacattatacttccttatatgcttttcttcctcaagccgtacactttgtgtttctttttgccacactttttttttattgttgacttacataatagtgattattaataaccatgtgatagagtcaatgttaggctgtcttgaactctcctctgccaaagaaattagtctgttactttcaaatttagccataggtaagtttttaggatgagggtagaaaacagccacattctttgccaaaatatcacaagaaccatctctagtccagtggctaatttttcccctctcaaacctcttgagctaggcctccacagtccgcatagatcttgacttactgctgtcttccaaactcctactagactggaccattaatctctgcttacagcattcaaccacttttccagaccaaagtaccaaagtcttccatattcctccaagaaaaccacatggacaggtctgccacagcaataccctactcctggtgccaatttatgttttagctacatttctttttcttttttacatttatttattttattaagtgtggttgtgaaccatatgggtgctgggaaccaaacctggctcctctgcaagagcaacaactgctcttaactactgagcatctctttagccccttagttacttttctgttgctatgttaaagcaccatgaccaaggaaagttatagaagaaaaagtttattctagccttatagttccagaaggttagagtttgtgatggcaaagctgaaagctctccacccagaaagcacactactgacagctgaaggaatagttccttatcttttaaaaagaactttcattaatcccaattatcacagcctataccagaaactgacctagttcctgggtatatatgtagactttcctctttctatgtagactaagacggcctctaacacatctacctgtctcttgcttctgcctcccatgtgcaaggattaaaggtatgcactacacccagcctacactaaagtaagatggaaggataaacatggaagataaagatacttgaaatttaaattgcagaaaaactgtagatattggaaaggattgaggatactatctaaagcttaactctaagagcaagctgcccagttagagtgtgaaagacaacagaattaaagaggataaaaaattgaaaagccatggtaatggaagattattcataaatatgaatatttaaatctcaaaaaatgaggacaagaacagaagcagaataacagtgactcagatgctaaaccctctaagcaatggtagggattgtcacagacagtggtgaagagctcactggcacacaaatatgctgcctggtcttggtctatgttccatttttggctcaccaattttttgtttgtttgaattttttgtttgtttgagataatgtttcattatgtagaccaggctggctttgaatatagaggtcagcctgcctctacctcccaaatgctgttatgtttaatgtttaagttactcaccaccatacacagacaattttttacctttattttccaaccatctaagcctttttatttctatccaagtataactttaggtacattgcaagtggttttatagttggtatcttaatattgtgcaaacccacctattaattccttatctatatttagaaacatgttgggtttttaaacatacactcttctccagttccccacccctgacacacacacacacactaatttaggtgtacctacagtgcccttggcttctctgttaaaacttaactattgtattggcattgttagtttttttacgcctcctactagattctaagcccctcatgtacaaaatacaaatgaaaaaaccatggaatgaatgagagagtgcctcctgtataccatcctatgggggcttgagcatgctatgcaagcgctctacaattgagctacagccctagccttctgtctgtcactcttttgggacattcctccctgctctgtattcatattgtcctctggatctcctttgtcttctgacctatgacctctggattctgctggcctaagcccgccttcttttaatcatattcctaatctagtaaatttggtacttagtgaggcttgctacacaacattcaataggtaaagtatgatgaagggacacaaagaactttcagtcatgtagggaaaatacacaaatattaaataagaaagttatgtgtgcagtgacaacacaaggaactcttgggtatacataaactcctttctgaccctgatgtcacctttttgctcatcctacccccagacctatgagcagcggaaggtggtggagtacacctgccacacgtccttcttcatcagcattgtgattgtgcaatgggctgacctcatcatctgcaagacacgccgaaactcactcttcaaacagggcatgaagtgagtgtccactaatagctaccaactctccgcacactcaaacacgccatttccttgccttttcttcccacatctctctttttgtttgttttgttttgttttcgaaacagggtctctctgtggctttggagcctatcctggaactcgctcttgtagaccaggctggtctcaaactcacagagatccgcctgcctctgcctcccgagtgctgggattaaagacgtgagccaccaccgcctggttcttccgacatctcttacaccaatcaatcttccttcccagaaacaaaatcctattatttggactctttgaggagacaatattggcagctatcctgtcctacactccaggcatggacgtggccctgcgaatgtacccactcaagtgagtaaaggagaatgtttgggaggaagtagaaggaaatgtgcgtttgactgggactgcccagaccactggcgctacactcagtgactcagagattctctcacactccaatctgtggcctttatttagagtagtattagaaactatgtcaagtgatcacaagtcattggacttgcaaattcggcagatttagcagtgtttaattgggtgggtttatatgactgtatctgatggagctgaatgaagatgcacatttcttggtccaatactcaaggcaatagtctaatttaccagggggagtggtgcatgcctgtaatcctaggaagcagaatcaggaacatcataaattcaaggatatccttggttacatagtaagtttgaggccaacctagaatagaaaccctgtctcaaaacaaagatccaaatttatggttggcttaactaattcttttgtttttatacaagtctgttttaatgtgagaatgttttaatatatgagattattgatattaataacattaatttgttttaatatatgagaataatcatcctgaaattcttactgtccagatccttgtcttattcaattctcagcttcttattatgttttgctttaacattaatgcatacttaggaattttcaagacagggtctcgccctcatgtacccaggctggctttgtgcttgctgtgtagcagagaaatgaccttgaactcctgatcatccttgcctcagtctcccagtgttgggattataggagtgcaccaccatgcttggttttagttggtaatcttagatttacagagaacctggggatgtagctcagtgaaggtgtgcttgcctagcatggacaaggccctggattctgtccccagtactaaaataaataaataaataaataaataaataaataaataaataaataaatctaaaatttaccaggaaaaaagcagaagtgccattgctaccatgtcacatgcacaggcagcctagtggataatttagtgggtattcttccaattcatttctcgtgttttcacatgctttgctcatctatccattccttgcagtgttatacacattgcttcctacaatgtaggtgctgaattagcatttaatagtgggactagccttagacatcgacaatcctaagtttgaaactcagctctgcatattttgtgacttggaagaaatatgcagcaattctgagcctcagccatcagtacacatacggaagggctcagtatgtagttttaacagcagagcccaggtataacatacgtgagaccctagaattgtgctccagcactgggaaaaacaatagaatccagcagagtgttgagaatggcatgtaaaacttggctctaagcactgagcctatctggctcatggagggtgttttaatagtagctttgcttttgttgctgttgatgccaataacaaatggaagtgagccctattgtactctgtgtacaccttggccacagtgcttagcacctaaaattatttatccattccatccatctctttcctcatatctctctgaactccttgagataaaaagccatcctgaaatcatgataccttacacagattcagggtctacatgcaaatgttgttcaatgaatggaaaggtgtttgtatatcagctgtttgtatttatggcatgtgtagcagatgaaccccaacctcagtctgcaccgtccaatacggtagccactgtccatatgtgactactgagtacttgaatatgactaatgagcatgaaaatatgtatttgtaattttagcttgcttaaagttcaaaactaaagcaacattaaatatgtctctctaagtacaatatgagtggcgctataatctacagtcctaacaatgtaggagactgaggctggaaaatcagcaatttgaggtcaccctggcaacacaaggttgctatttcaaaacaaacaaacaaacaaacaaacaaacaaatggaaggaaatgaaaagataattttattcttttgggttatatttccttttagtcactgaaatgtcatattccaaacccagacatggtgtatgactgtgatcctagcacttgagagatggagccagaaggatcaggaattcagggtcatacttggctacacagcaagttcaaggccagtctaggtaatgagaccctgcgagaggggtggaagagaatatctagtagctaagttgagataggtgagcagtacatgataaccaccagatttccaagacttattattcaaagaagaatgtaaactctcattagtaatgtttatattgattggcatgggggtatatgccttgcttgagataggaggatctcaagtttgaaggcagcttgagtcacaaaggaagacagtgtcttagaacaaaacagagcaaaaagatgtttgtattgatcacacacacatggaaatggtattttgagttaactaaaattattaaaattccttgtgtttcacttaccttaacatgggcattagaaaactttgtttcacacacgtggtttgcattctctttttctttttctctctgtgtgtgcatatgatgtgtgttcctatatgagaccaggtgcacatacaccacagtacacatgaggaggtccgaggacaacttctggggtcagtcttcaccttccaccttgttagagacaagaggctctctcttgttcttggctgcatgcactaggctagctggtctaccctgactctgcagactggactgcctctacctctcatctcccattaggggactgcctctagaggcttgtgctactgcagctgggttttgcgtgggttctagagatccaaacacaggtaaccaggcttgtacagcaagcacttcatccactgagccactatctccatccatctcctcacccttgcattatatttctgttgaacagtgtggctgatttatgtacggttccctgtcactcaagggtataaaactccttgagtccatcttcttgggccctaatgatagaagaagttcaaagagggaagaagtgtctattcggcaatgtgggagtacatataaacaagcataaataagtgtatatattgccttccatagttgcaaggcttagagtatgcagaaaaacagcagggagcctttggagggactctcaggagctcattaaagtcagctgacaatctataaatgctgcacttaactctggacatggcatctgtcatattgccactggcattttagatttgtgtctttcctctccacccccaatcccttagcactcaggctctggcctcctcataggggacatctacacttgcccatctccagcacccagctcagactccacagttcccatgagccattgctgcttacccttctccggcccctgtatcttcagccacactgaccaactcttgttctctccaggataaactggtggttctgtgccattccctacagtgttctcatcttcatctatgacgaaagcagaaaactcatcatccgtagacgacctggtggtaaggctgccctggaccttgctcttgagtggtcaccaccccatctggctcctccagacccactggctgtctatctcaccgtctgtcctttgctcttcctggacccctgtcctctactcctgattccacgtgttcctcccagtgcttgggggccctgttccatgtggcaggtggaaaacctaccccttttctgctgagctcccctgcacgccactcctgatgacccccgtggttcatgtcctctcttctccacaggatggctggagaaggaaacatactactaaatgcaacagagaaaaatcttcacatgacactggtctcacaaaagctgaggctgagtgtgacacagcaactgagataaagccgagcagggggggggggggcagagaccctggattgaatctactctggatgagggagaagtattcctggggctggaccaagaagagcatgtagtaggaggtggggtgggttaggcaaagcccagcctgctctgcctggagcccggtgaggaggtgcagaatcttgttacatccagtagccagtctagagagtaaacatttggaacagccctcacctaactggtgtgtagaggtctgattttggggggaatggagggtgctgtaaagctccctcccaacacctacattgtacctggccaagggaggcctccggggatctgagaggatgctgggaaggtactagaatcaagcatctgtggctgggtgtgttggcacagacccttaattaccatcatttggaaggtagaggcaggtgggtctctgtgaatttgaggccaacctgtcgatgtggtgagttccaggccagacagggctacacagtgagatcctgcctttaagcaaggaagattaagcatacttgttgctgaaaggtatttcgcattttaagatcagtctctgatgtcctgtcagtgtaagggacaagcaaatgcccccaaagtctagctagaaccagctagggaaagggagacaagagaagaccagctgagctgcatcttgtagaggtacaacagcacccatatctgttcccatatttgggacttgtggagccaaataatctagactctgacttggatttcctcaggccagactacaggccacagcattgttgctctaaaagagacctattgatatcaggtccaaggttcaatgacttgggaatggtcacctggagtcggggacggggtcctctcctctagggcagactggtggtccctgtctgttagccctgtcatcaggacagtcccaccctacgtcatcctttagccttttatctccagtataaccttgaaacaggctgtaagtatgctaggcaagtattgtactgctgagctacaccagaaccctgaacccaggcttttctggtctggtcttagtaaaaaggtgcaaagagcctctctcctaccctccctcctccctaggttcctccccactttgtctccccctcatgaactcgtttccgctcagcgagcacctctgcttggctctgtggctctcagttcattctcaggtaccacttagaggtatctgccccacatgacacagagagatgctgaggaaaaccttgagggaacaagccagcactgttaccaaagtgcagcttaggatcaacttcatgcctcctggcatcgtaacaaggaactgtacccaccatagctctcagaattatattcccaccactccactctgtttcaaaggaggagaaactggagcctcattccagaacatgtaccattagacacttttcaaactggaaccaagcatggttacaagcaagtgggataatggcagaggagtgtggatctggagaatgggatcttttgcaggctggcagtaaacaaaacaaaaacaacaaacaaaaacccctccagttggaaggtgctgccagcacctctttctctgtatcaggcttctttctcagagggttccttccactccttttctcttccaacacaaggtctcctggggacagagctctatcagtctggggtccaccctggctgctgacagggctgaaacagaccctggaagatggaagcaggggtggggagggatgtgagtgagatggggagggggagcgagggaccagctcctcaagtttcagtagtgaggaactttgagtgtctggtgggttaaaaatactgacgtcccaactcagggtcatttgatacgggtggctgggacatgttaaatccaaaggcttgcacgcagcatagagtaaagcaccagagagaggaggcctagagtggtcatgtggggcctggagagggaaatggagccagaaagggccaccggtgagcagtggtggctgcacaggaggagctgaaggggccggggtcaccgtacagtcctgtctcattccaaaagtccagttcatgatggaagaagtctaatgctccattgtttgttcagacatttacctcttcccagacccctgcagaaatgagacaccaaggctgcacctactcaggggcaggcctgcccatcactcctgggtggcctttgcagccagggtcgtaagctctgcctggcacatcaggcactcccctgggagatcgagacgggattctgagatctccccagctccagtgccatgctctggcctctcctgctacagtgacagctgtccctcttgtatccactcctgccagttcttaaagataagttagctgcataaggtctgccccatggccatgaaagaagttcttcggctaatataacttcgtgtttctacctagatgcaaaataaacactaccctttgagaatgagaagcagacggggacaaggaaggctgactttatgtgatctcttcattgattccctctcgcctcagtttacctatatagtacaagccctagaagcccataaaaggggtcttgatagatacttccagctaaattcaactcttcgcctccaagcgaggagcctgaaactacagctctcacacctccagttctgctttgggcctcagacacacagccttgggtaaggccacagggcccagctcttcctgtttacctcatgctaatttcccatatttatactgattatctgtgccttatcaaagacataggaataaacagtagctaatagccctctgtagaatcctacagcatggggaatcctctgagcccactgtgtcctggaaacagagtcccacaggagcaaacagagagcacccagaggaagtgccccctccctcacagtggtccttccaggcagaaagccccagtccacatccctacaggatggactatgggccaaccctgtccttccccctacattcctgacttgggactgttgagtgaagcaaaggaaactggctggagtcaagccaggtttctggtcttggactccactccatcttttattcagagaatgatctcatccttggtccacattctctaaagggaactgcagggggtttcttttctggagcctggaatgcacttttattgcctcccctctccactgtaagatcaaagaaatagacatcacctacagatgactgccagattttaggtgtcagaagaaataccatatttccactccccttcttcatcctgcattttcagtttagcctctgacctatcctgtgtcgtcctcttcacctacatttctttctgattagccttgtcctaccctgggatccccggttacccctccagctcccctcctccagcccggcttcacttacccctaactcatctggtcttatttttagaaccggcatctctccctttccctttcttaatatggcgatgagctcttaggcctgcatggggccaggggctgaggagccctagacactgggggagggggaaggaaggagctgctgggagcccagggaagagggaggattcgggctctcatggagctgtcctggcctcagaaggttatccatctcccctgccaaccacagagacatatttagacagggccaggtggggacagaggggtgccaatttcaagggggcagctccggttccctccccgcccctgctcctgttcctcgtcctgaccctttttcacttggctctgtgggcagtttctccaggacccagcagcgttctctgtccactgctctagcccactccctaccccacccccacctggagcccctaactcaggattcggtatccagggccacctccctatctcagctaacctctggaccaggagagcagacccagatcccgctacctccatgagagctgctgacagaatgggggccagggcagtgtccaagctgcagctagcactgctgtttgtattggtgctggggacaccgaagtcaggggtccagggggaggaagggctggacttccctgagtacgatggtgtggaccgtgtgatcaatgtgaatgcaaagaactacaagaatgtgttcaagaagtatgaggtactggccctcctctaccatgagccccctgaggatgacaaggcctcacaaagacaatttgagatggaggagctaaccctggaggtgagtagaagatagcaggcctcaagagcatgcccagccccctctgtgagccccatgtgtgagggtggtggctggggtaagagcatcacagggcctttgtcttcacagcgagcatgactggaatgcggccctagccagaagatcaaagactcggggaccaaggtcctacccttcctttggtaactttagggtcagtgctgtaagggtctgcaccctctgtgctgtaggaggcaggggtactaggtttggctgggatggtggggagctgcttgctgtactatgcattgtgctccataccaccaatgtactctcctagccaaaagatgcccctctcacactcttggggctgtacgccaatatcccaatagcaggaatgtaaacatgatattttatttatctataactgatttaatgactacatggttaaatagcttctcaagcccccgggcccccagcccagtccctctcattcctccaattcctcctttgtccctactggatcaaacaactgtcctcagtagaaaattcttgtggttgaaggagacttcagcatgccttccccttcttttctttcagagaagagatttcttttcctttcaggctgactttacccacagcagagacggttaatacacaaaataataacaataatgcagggtgtgttgtgggggggtctttataattggaatacatggccatgcacatccttaagggaactaagatatgtttgtctccttgtctgaacttccctggccccttctctggcttgttggtactcagaggccccactttgtacagagcttggaacatttcagtgtaagacaccaggtcgcaagcttgcatttctgtgtgccctgttgggctctggaaaccgctgtctgattaatgagccaagtatttttatcctgagtgctcagtggcctctgccatccacctgccaccctccctccagttcccccaaggatcactgtgctgcagtgctgggtggggtacagctgcaaagtatgcccatggcaggaagaatcagggtggattgcagggtgggagcttgtggggtagtggccagtctgagtgaccgaagactggctagaagtgctacgggtaaggaggtggtggacctggaggaagagcactgcttagtttctgccagtggctctccctccactgggagatgaatggtatcctcttgactttgtggcctttcccaccctgtcaacaatatgaccactcccccaccccatcctccacagttctcactttggggatcccaaaggtcccgaattcccttatgctgagtttggtctttgatcaggatggaaggcagggcccagcctttcacggaaggtgaaactcctcagcttccctcaggaacatcacaatgaacagtaaacactcatgatctttgaaaaagttgagccaagccgggcgttggtggtgcacgcctttaatcccagcactcaggaggcagaggcaggcggatctctgtgagttcgaggccagcctggtctccagagcgagtgccaggataggctccaaagctacacagattaaccctaggcaggccaggattgtggggtgtccgggagatagtctgggccttaacaagtggtcaaaggtcaatgcttgagcttcttgttcctcggttgacctgataatggggaagcattaaatggggaaggggtttacaagaatttacaagaattctaggggctaatttcaatcctgactctttcttccagttagcagcccaagtcctagaagacaagggtgttggctttggcctggtggactctgagaaggatgcagctgtggccaagaaactaggtaaggaaggggagaggggcacgaagcagaaggggatggaagaccagagaggcctacatggaggacttgggggaaatctgaggggctcaggagctcctcaactgcatctattctgaagtcgggaagggggtcaaggttggagactagtctgtatggagacccatgtgtgctccaatcccagcacgagatggggtggggtggggtggtggccttctttatgcttatctagaaaatggctaaggctgggcatgagcatgggcatggtggctcattcttgtcagtaaaattgtgggctcaaagcctcctgggttacatagtaaagcaacaacaacaaaaaaatgcatgtagatactttgctttgtatactaacctaaacaatttagtttaaaaaaaaaacaggaaagaaaaagaaacacagctaggtgttggaaggaaggggaaatcaaggaatataggcatagccagagagaccttctgcaaagtcctttttcaactctcctctttccctccccatttccccccctcccccctcttagcagagcccagatgttacatcacccggccaccaggcggcagcacaggctggacaccggatgtggatgggggaagggtagttagcaacaagtcatctggccggcaatagcagagaagcagctcctagagtctgcagagatgctgacaggaatagccatccctgtctatgtaggcagagcaagggagctgtgttgctagaatctgcatccttccggtttcctccccctcagaccctacctgctcctcccatcctaccccttgccccagcttcttagcctgcctggctgtgaggctagctcctgaactaaatccagagacatggacataggaatgcaggctttaagggcttgttgaaggtaggtgggggagagaaatggagaggtagatgataagtttactgggattatcaagcggactctaaacagaagttagacgcagaaggctgggccatagctcacctcccatgtgctccttaggactaactgaagaggacagcgtttacgtgtttaaaggcgatgaagtcattgagtacgatggcgaattttctgcggacactctggtggagtttcttcttgatgtgaggattcccctgaacctgacatccttggagtttccaatgccccttagtctctaatttaccctacacccctacacacaccacagacaccacaaaccagacacacacacatactacatatgctgcacatataccacatgcaacatacaatagatatcacatacatatatgacataggtcagacacaatgcacacaaaacatccatggaccacacatacatgctcacacatgtaacacacatcacatttatgtaccacatataccagacccacaacatacatacatacaatgcacgctcctatgcagcacacatgacagacaacatacacacacatcacacataacatgcaacatacacaatttatatcagacatctactttgcgcatcagacccataaataaaccccacatacagcatcacaaacataaaccccatgccaaacagaagctacagaacacatacatcacacgttgcacaacactgagactacacacatacagcattaacagtgtacagcacacgggccacacgcccaccctctaccaacatctaactcctcttctagtccccgccttttccctggatccctctctgggtcctgtcagtgaggacagaattgatctgctcaatgtgcttgttcctgcaggtcctagaagaccctgtggaattgattgaaggtgaacgtgagctgcaggcatttgaaaatattgaggatgagatcaaactcattggctacttcaagagcaaagactcagagcgtgggtaacagctccactgctcccctctctggccctgcatgtcacctgtcctcctgcctgctcgtgccggtggctcagcatctctggctctgaactcccatccgtctccttccttctgctcatctgtcctgtactctggggcgttcccaaccccactcccaccacaattctatttattttattctcggagaactagaggttagaggggatgggtctccttgtgggacccacatgtcaaggaggatctgcagagaagccaggggggatgattctctggcagaccctgagaatgacgatcccttcttcccctcagattacaaagccttcgaggatgcagctgaggagtttcatccctacatccctttcttcgctactttcgacagcaaggttctcttctccataaccacaccgagtctccctacactcttatgttgccccagccttctctccccaaattgatagggtcttggtctcattctacatgctggcactccccaccccaaactcatcccttccttctcctatagaattgaagaggagggggccattagattgtctaactcacctttgtcatgtttaattaacccagagaggttaagacactcccccagtgtcactgtggtagtgacagagacccacattttctgtctccttttctgcaacctgtttccctttatactagttcttactccgacccttcatctactccacgactcttgtctgtttcctcaaaggtggcaaagaagctgactctgaagttgaatgagatagatttctatgaggccttcatggacgagcctgtgaccatcccagacaagcccaacagtgaagaggagattgtcagcttcgtggaggaacacaggaggtggggagggagtaaccctcttcctggggcagcttcctcctggggctagaacaccagtctatgaggcgggctgggaaacgcaagccaacctgaaagccagtttccgctggagatgaatacacttccgggaattggtgctcactgatagatacactagtagttctgcactatattctgtagcctagaacttagccctgagccctacatggagaaagtcctctgtaaatgtgtatggactgtggggcttattatgatttaagtaatttgtcaacaaatgagtagtgagtatctgtgttctgaccagggacttacaaggcaccttctctctactgttaatttcattcttttatcggccttgagtgaaggctcaaggggaggaagagtaggaaatgggatttaagccttagctcagctccacacctcttctcattctccacactagcagttgtcaacagagatagagggacaaggattttgctttccagtggctgttaggcaatgtttccaagacatttttgtctgtgaggactgttgctggtattcagtaattagaggccagagatcctattaagcatcctactgtgcacagggcaccccctcccctctgtgtcagcggtgctgatgctaggaaaccctgcaatactcacacacaattctctttcttcatgtgactccacaactagaaatacccactcatcagtctaaataccacttactctctcccactagattctggcctgtttcattagggcaccacgtgtttgcatagtttaactctaccccactcagtccttataatgtatctcagccccctctctctcctggcacatattaggtgtgtaattctattgagcccaggcggtcaattttattgaatgagcaaatgaaaaaaaaaaagacgactaccctggtatccagttcttacctcccctgccccaaagtctctcttccagccctccccttcccactaaccattgttttgcagccatgcaatgatccgatccgggcctgatgcccagagcttagatttgctagttggctttgttaagggatacaagctgtctatgccctaggcctgacccagtgatggcttcagctgtggggaccttctggagggagatgttcttctcatgaactgagtagggaccctgtctctctcctagatcaaccctgaggaaactgaagcctgagagtatgtatgagacttgggtgagtacctctcccaggacccggtgcttggggagcaggggtgggtacaagtcttagaaatggcccttcctgttcttccttgtgccttctgcaagaaaaaagagagagagagagagagagcagtacctcagtcaagggacaaggatttttgtactgaagaacgcatctcgggtgacatgcataagtgaatgaatatgacaaggtagattcaaactctgagggttaccagagctgaaaaagtgtcactcataagagtcaccaccatgaaaatacaagctggcattctatgatgcagactcaggcaactccaagaggctgacaggagtagagtaaggtctccctcagctctaaccctgcccctgtcctcatcctccaacaggaggatgacctggatggaatccacattgtggcctttgcagaggaagctgatcctggtgaggaaggaaccctggagtggcctgggggaagccaggagtgggtggtgtgtttgttggatcataggcctcacacggaaggcattcctgggagtttgaaagcagcctggggcctgaaatgtgttggtgtaagaggcaagagaacaggattggattcctgtcctctcctttctgctctaaatcactttcctcccttttgccctccccaagacggttatgagttcttagagactctcaaggctgtggcccaagacaacactgaaaaccctgaccttagtatcatctggattgaccctgatgacttcccactggtaagaggccctgctcaagcactgggatcctaatgtggggacttggcctggggtgccttttcttttgtggttgtttcagaatgcctatccccagttcctagttggagacccagaaagttatgcctgctgcatgctcatgagcattagaggggatcctgagctaggggaacaggaatgagaagtgaattgcatggggtgtaatatgtgattcccagatcagaggcggacaggtaattagtgtgccagagctgaaaagcagttctctggtgagcagctggattcaactctgcccatgaatgtatattcagagaatcagcagattccatgatccaggagacagcactgtcctcagctgaacccccagcatctaacatatatttgtttggatgagcaaacaaagatgtgacagaatacagatgattgtcaggtataagtacttaagttaagacacgtaggacccgggctgtcgagatggctcagaggttaggacctgagttcagttcttagcacaaatgtctggtggctgttcagcaggggaactggtgaacacatactcttctgaagttatgcacacttgtggtaatcactcatacaaacacacataagtaaaaataatacaaataaatcttaataaaagagagctataagaacagagggctctgcagagagaagtgaggtgcccaaaggtacacaggcaatcataagcaaacccaagaacaaagcaggttttccattcttctttgaagggagaatctgccttcctcatctttttccttagagggttctactctttcactgattagctttacctacaagcttgtggtctacggctgggctgtccttccatccatcgccaattcatcctgcctccttttgtacctggcctgactctcatcctctgatggactcgtgtactcctaacctctattaagttgacatatttggttctctccacagttggtcccgtactgggagaagacgtttgacatcgacttgtcagctccacagataggagttgtcaatgttacagacgtgagtgtccgttcctggctatgcaccacatcatttccctcccacccagctactaaccaggctcaacagtgcttcgcctccaagatcagatgagactgggtgcggttacggtggtatggccttagacagagcaccaactcatctcggtatagctagttctcttccacactgttgctaagtaggaagcaagcgctgcccgggaacaaggaatatcccagtctaatggctggacctgtggggttggaacgcatgacctgagcgtttgaatcatccactcactggaaccacctggtctttcttcaaagtccagttcaacttcttatcctccattaagttgtcctttggaattattccctctatggcacctcacccttggagctcactggcattgagaaccttgccttttagcatcctatctcttctagcagattcttaatatttggaaggcagagatcttctggtgaccacatagttgacatttatttgttgagcagaattgaacagcacagcttttgctttcatagtattctcagtctaatggaataggcaagcattctatccattgtaaggctggctctgataaattttaagataagtaaaatgctaacaaggctgcaatttctgctcgagagactcagggtagtttaagagaaagtagtactaccgtggagatcatgttgtgtacaagatttcaataagggtcaaataagagtctccaaactgagagtaaagggtggtcaaaggacaaaagcaaagccaggcgtggtggcacatgcctgaaatctaagcactggagaggcagagactggagcactgcagtgagttcaaggccagcctgggatacacagcagagtatgaggccagccagccaactctataaagcaagtgcgcattattgttgttgtttgtttgttttttgagatggggtttttccatacagccctggctgtcctggggcacactttacagaccaggctggccttgaactcatggatctatctgcctctgcctcccaagtgctgggattaaaggtgagagccatcaaaagcatatcttaaaaaaataagttaaaaaacaaacaaaacactaacaacaaaaagtcagcaaaaaagtgaatatcaggtttgagaataggcaagtctttttaaacagagttttagagtttaagattgctgaagctaattgctagaaaatcattctgtgacaatccttgaatgttagccatgagtagccaccaatgcttttacaccgcagacatgacagaaatgtttgctttcagcagcacaggatggcaacagtaaagggagagactgaagtgaggtctttagccagttcaccttttctttctgctcatatccatcgctattccaactctgatcttcattaggatagttcctctggccactgaaggatacaaggaagggatgaaggatgtagagtgagtgggaggacaggtccagatctgtattaaacttagcttccgcctcctatctgtgtcatcacctaggcggacagcatatggatggagatggacaatgaggaggacctgccgtctgctgaggaactggaggactggctggaggatgtgctggagggtgaaatcaacacggaggatgatgatgacgaagacgacgatgatgatgacgacgacgatgatgactagttgctatggcaaccacctaccagccccacttgctctttacacgtgccttcctaccctccacgcacttccctgagctcctcgggacactaggtcattctttactatagggccgactgtggtctgtatacagggtgcttgaggtcctggtctccttcactggtgagaaaaggagctgcttttcctgagataccagcccagttctttcatctctcctgcttcttatcctataccttatccgtatctactgtttcctctcctgtcactccccatatttgtgattctactgccatttcttctctgtcccttccatcaacacagtctccacttttcaaatcttaaacctttctgactgtcctgacctggccgggagaaggggaggtactgtgttaagggatgtatctcacccatctcgtgttaatgtatttgggtcaaatgcaaggccttaataaagagatctggggcagaatgagcaagtgtctgctgttgatgaagtctcacccttatggcaggagggaggcacccaaaggctgggagatttaactgagtgccttgttaggaacaagctagggggctcatcagcaggggtaggggcaggggctcactccaggcagctatcccagggaaggctggatatttatctgcctccagttaacaagctttttctgaacacatggtgtttgtccagtgctgttgttgggctctggaggaacacacagtgccaggcctgtcccttctctcaagctgattacccttgctgagaagtcaagacaaacaccctagatgactgaagactaacagagcaatatgcaattgactatgttgctgcttgtgccctccctgaagcattttatttgaacgtcaaaatttgagtccaccgttcttccttagtgagggtccttccagaccttggcggtcctgccatcctttctgtgtatacctccattcttgtacttaatacgccctgttcagttacacagccactgaatggagtcctgagggcaggcacccaggctgtctttttatttccatagggtcttgtacataaagacttctaagtctggaaaaaggagccctgagattaaagttttcactctccccagacaaatcctgtgctcttaatgaaaacggcagaagcatacagaacacaaatcaaatattcaatcgactgttcacacacaatggataactaataagtaattgggtattaggttacatcataaaaaatatggggtttgtttagtataggtcagtgacagctaccagactaaacaacttcctgttttttaagcactcatctggtaccagtccccaaagacttactatttctgattcccagtggcactagcatgcttgtctggctgaagaggacactgaactttatggacttaatgtctgaggacacagtaagcgtgaagtccatattctctgggtccctctgcctggttgtttcatttaaataactacatgttgtgcagttcctctgagtctcaaagatgggtcaacaagatagacgttggtcctgcaaaattagaaacaaaagcaaattccaaggatatgctatcttcaaaggggccacggccagccacgctgaaggagaagaacaaagagaagcactgtgaaaattaaggtgacagcaacgtgagctgcttttcccagaagtgtggccccgagtagggaaggactcatctgaggcttctggcagggcctttgccaagctgggactcaggcaagctagggtgttctagtggcatgcaaacactgaagatgttcacttttcgggaccaggcactttgagagttgagctgagattccttctgctggagatggggtgaaaatcggatgcttctccaattctcccttccctctttcagtctggctgagaatctgggggaggaaagtccctgaggtggaggggaagtgagaattatcacactgggcctaagcagagggacagagttaggagacagctaagtgtggctttgttagttgtctatatttgcatgctgagctcatggctttttttccccagaaaataaaattacatcatgtgtgtgtgtgtgtgtgtgtgtgtgtgtgtgtgtgtgtgtgtgtgtgtgtgtaggggtgagtgtgtaggggtatatttgggaaaggcaggaggagctcagggatccagctgctattatccagaagagatcatggctccaggccaagtaaaagagattaccctgttgctgcctgtccccatccccttttctattcctagcgtgaataaacttggtcattttctactgatcctctctgacctataaggctgggaagcaggttttttcaaagtagcaagagaacccagggaccacaggctttccaaatcccctaatccaaattgcttccgccttccaggggtcctgaccaccgtgaccatccaaagggcagagggcagagggcagagggcagagggcagaaaggcgacccactggggaaaaagtaatgtgagtattgttccacagtttaagtggaagaggcagagtccatactcgagcctagtccggtccgaatcctaggagtcttccagaaccccagcccacagtctctctcccctcctgcctcccctcccccttctctcgccgctccccgccccccgcccctccccggctctgacatcaccggccagtcgggtggggtgaggcggtgctgggctcaggctctgctccacgggcggaagaggcggcggcggcaggagcggcggcagcggcggcaggagccaagaagcaggctccggacgctgcttaggaaccggggacccaggagtgcccgcaccctgagctctcagctccggaggcggtgagaggggcaaaggggagatgtttggcgggaaggaggtagattggggggtctggttttggagaggtcacgatcctgaacccgggggacaaataggggagcctgaggatctagacaggtccaccgtgtcaggccccatggggtttatgtcggtgcatccagagtctggactgcgctgcagacggagtggcttcgtccgcccattccgcgctgaacagcagtttgggagtccgatggggcctggggattaggatgtagcctgcttcccgcccagccggccgggccaggccagctcctgcccctccctcccttgctctagcttcggactcgcctctgcaggcggtctccgggctcgcctcagccctgcctcagttgctcaggcagcgggcagctggttacgtgtgctctcacacccagcctactgcgtctggggagagtgggattggtggaagcttgcccggaggaaaggaggaaggagctgggggtgcagaggaatgatgtagcctacgtaaagaccccaattaattaaaaaaaaaaaaaatccgtgtcaaacccgacagggacacaaacacacctttaagaaaaaaagccaaccacacagtgacacacacccatgtgacttacacacatcctcccatacaaaccaaatcacagcaaacctgcactacgcatccacccacccaccacaacccattgcctcccgtgtggagtctccttgacatctaacaggaatgttgagtagtggatgaaggggccactgtccacaaatgcacccagattttatgggcagctttagtagacaatacctcaaggactggtgagcctgcgctcttacctgggtgaggggcttcttatgaccttccttgctgactgcacatttagagcatggggtacctgggagtggctcgattctgggcatcagtgtggccaaaggatggaggagggagtggaagcaagggagagagtgaaaggaatgagtcagccaaggatggaacccaagttggagggagggagggagggagagagagacacacacagagagagaagagagacagagagagaagagagacagagagagagagagagagagagagagagagagagagagagagagtcagagacagaggagaaagggacagggatccatccaggtaaccagagagaggagagagagacgggtgaccagaggaaccagaaggaaggatgctggagagtaggctaaagaggacagaagttagggagggtgaaggaagcaaggaggtagaaggagcatgtgaacatttgtgccttgtttctctaggttatatgtctggcccccaggctgtatgagtgattagtgttaattgctcttccctttgcggttaaacactccagtggggaaagtgccagcatgccctcggctgccagcttctctggttgcctacttcttacatgccacctgtgctcagcaggtgccatctacttcatacataaggtcacagactgacactacacctcacacacagcttcacgtacaacgtcaggttagccatcttcaccagctagtcagtagccaaccgtgtgtgtgtgtgtgtgtgtgtgcgtgtgcgtgtgcgtgtgcgtgtgcgtgtgtgtgtgtttccttcctgtcaaactttttcagtcgggaagctcatcccttccttgtggtggctctgggtatttcggtggggacactgagtctcatgaaggtcagtgtatccatggctaccagcaaacgggatgagtggataggaagagtggaaggtaagaatgcccatgaaagagtaaaggaggctgaggattagctcagtagttgagtacttgcctagcaagcccaaggccctgggcttggtcctccaaagtggggttaagaaaggtagctgaaagaggtagaaaaagaaactaaaaaatgactgaggaggaaggtaaggatgtggacgtgacaaagctgagaataacaaacagagccagtctagggagagtcacggcgcccagtacctgctcacagtcgtgaaaccctcttctgccctgcctaatccaatgccagctagctatctttggctgtctccatcttgggcttggtcctttccagtcccaggggcaacctgtttttcttcgtagatgcagattttggagccctcctgccaggctgaccttggaactgtaaagccctcttctttgttacaggaagagaggcatgtgcggtgagatacccaaagctggttaggggaagaagtcagttaagatactgggaggaataaactgctcttcagcttgcatttgggacccagacatcacttacattacaatagcaacagccctactagctccccaccccccacctgtttcccgtcgattgcttcctccagctcccaacttcagactgactgacttaaatgaatgccaaggaatcccctcctgcccattaaagggacctcaggtccctgcatctgttaccgggtggcccctcccctcagccagataacaaatgtggaggaaggggtaaaatctaatcctcaggcttcctttttaagtttcctctgtggaacccaatgttggggaaaggggacaatcgaccacagattagtgtcaatgctcagaaattattttggtaccgccacctccaaccacaggtgcctatccatttgctcggcttctctgagcaaccagcagctagcttgcttacttgtctaaaggcccctttccccccagtgtccttagtggtcaaggctatgcctagagccagctgaggtggggaggaaggaaggaaggaaggaaggaaggtgtgaggaagcagcgagcagagcacagattgagatgggagggaagggagctgacttcctggcagcctgggatccagttcctgccctggtatcctgtcctgagaatgtgccacccccaaccccaccactgcccccctggtgttcctggggcagccctatgtgctgctccacagatgagaatttttcagagccaggaaggcaggcttctgataggcccttacaggttgaaggaggcaagctccgccaagccccaccgtaaccagactgaccagccagggataatagctgattagtgaaacctgaaagtcatgtagggcagattctgcctatctgtaccctaaaaaaatgtcccctaactactctactctgcccttgcctctgccacacctggctgtgggcaaatcgtgactttagattctccttcattgctcccccaagagcccctattctttttttttttctcctgtcccttagccttctccacactcttcccatcggtggtgtcattgtcctggtgactggcagggtgtgtgtggggtgccctgaactaaggttgctatggtaacagctaagtggaggctgcagccttgtggactctgtgcttaactgcccccccccactaccaccacacacaccagccacacacactgaattcctcatgcgcagtctttcccagggccagctctcttctgtcacattgtgggtccccgtcacccctctgagtgcaagactgttcttaacattttcttgcatactctcaactggctcaaacacaaacatacgtcgcacataaactcatggctagcgctgcacatgcctccattaccagagcatcttccacatacctgttctcacccaggaaaactcaggtgcatgcattgcgtacactcgtgtacacacgtttccactggccactttatatattcctacccacattcctctttagggcctccttgtatgttttactcttggcaagctcctacccactgcccccaacctttgtgggtgtgtgtgttacacacactaatcccttcccgcctacctccccggtagatctgtgttttagaaccagagccctaaatcttaactcctcccaggattcacacacagtgctacacactctcctcccacagcagctcgtgtatttacaaactcttcctccctgtgaaatcaaggcagggtgaccccttttccaatgaggccttggtcccagagcctcatttggggcagggtcttgtctccatcctgggctactcttccagccccctccgccccccccccccacatccccttttctgcactaggattatcagtggaggcggggctgggctcccgcttgctgctgtgtgacctagatttcaaggcagagatggttcctggtgctgacagtcagagagcattgtccctggccctgactggtaggaccaccgctgggcccttctgtctggtggcacctgggtgtgcaagtaaaaaatgtttctgaccaattcttctggaggtcatgctagtcctgcagtctggcttattgtttgtgtcacggcgcctaccattgaagaaggtttgtttattctggtcaaagttgggggctgagaacagggactcatgggttcggatggatgcagtgcccatggctctgcctcagttcccctacaagagagactagaaacaaggaaaacaggtttttcaacctgccccctttgatctgccagtttcagctcagtattgggtgatgcatgggtagctttggtcaggttcaaggccattccatttcctgcccacctttgggtctagccacagactgtttatgatgtagttactttttaatgctttaattttccgaatacaaaaatatatacttattgcagaaaagagttctttatttgaaacaaggttttgctatgtagtccaggctgaccttaaacttgccaacagttctcctcctttagactcctgtatgttggaactacaggtgtaagtcactgtgctcagttaggtcactgatttcagcttaccactggagtttcacattttatcaaatcatgaagttcattctaaggtctaacctctgttttttccttaatgtacattggtgttttgcttgcttatatgtctatgtgagggtgttggagtccttggaacaggagttagtttgtgagctgccacgtgggtgctagaaattgagcctaggtcctctagaagagcagcccgggcccataagcaccgggccatctcccagccccaggtctgacctttctattttagctatagtttctacttcagtgaagggtgtccttggacaaatgctgtcctccccgcccaaggattaagagaggcattaagttagacctctgtcaggtctagccttgcctgtgggaggccaggttaaaggtagtatcagaggatgctgataaaaggttagcatctcccttcctgccagactctgaaagctacatctaaactcccctccccccatcacccagcctgcctgggaactgggcagggggccagagccagccgctgcttggtattcttgggcgcgggggctgcaggcacagcacaaaggcctaggaaagagggctgagttggggcctagtaaactatcaagggagaaaatgggctccacaaaggtgggggtggcccactgctccctgctaccctaagacctaataatctaatgcagggggtaagcatgggagggacagggatccatcagaccacgtaactaggcatccatccaaaatgagtcattaatggggtggtgggaagatgaaatgagggacccctttgcttctggtgaagaatggaagagagaatacaggggcttcaaccaaacctttttagcttctcactgctaagccaagcctgtgacagggggaggagttgtaggtgggtggggcaattggggagggggacttggagactgtaagaaagtctgaagaatgttgccatggtaaccgcctcctcagtcaggggagctgttgccagggttactgttaagggagggaaaaagaaagattgtgtgtatggggtgggggggggggtaatgacttgtcattccatggtggctcctagctttcctgagtttcttcttgtgtgtcagggttttccttggctccctccagacctgccctctctcctaaacctccacattttaggtacacaccaccctagcaggacaaagtgtgcgctcctgtgtgtgttgttgagcatgggggtaaggcgcagataagtctgggcagtaagtgaaccagacccacacactaagctcagcttactactctccctttattactctcccctccagtcatggccgagtacgggactctccttcaggacctgaccaacaacattacccttgaagatctggagcagctcaagtcagcctgcaaggaggacatccccagcgagaagagtgaggagatcactacaggcagtgcctggtttagcttcctggagagccacaacaagctggacaaaggttgtggagggggctctgttcattcagcaaacagaaatgtacacaaccctcttacacaaagtgacacctgatgacagggcagggtaaatgataaactctgagagactacggggtttccaagacagtagtcattagacatgcttcatgtatggcttttattagtataaaagggttttcaatacccttgtgctaccactgtatataacaggacatgaaaacaatttaaagtggtaaaacttaaaaccatgattctaatgttttcttacctactttcagagggagggagacactggattagaacagtaactcgcagctggggcttgcagggtgaaatggtgtgtaagacagtcccaactgctggcagagtagcaggttaaagtacttgccatgcatacctaatgagggcccagggctcaaagtgaaagaggcaaaccaactcctcaaagttgtcctcgaaccttcatgctcatacccacactcacacaccatgatgatgttagactccaaaggcaagtgggattcctaaggtagaatccagaggacctgtttaagcaaaggaatgcagtgtagcttagcaggactaaaaggactgggtctaattacaggtagctgagaatgtcaatcttgagttacatgtgtgtgaaaagtaaagtaacctcagagttactttgtatgaactcttctagctatagtgcagcagacagtatgaggagaactgaaggaggatctaccacaactcagactattgccaccactggggcagggggcttatggtctgatggcacatataatcttctcaaaccaccctgattgtgtcagagctttcgctcccttagtacgtcacttttcttactgggctcagaacctctttgatttggctataatctcgtcctgttgcacgtgtggtgtctgggaattcttcctcatactcatgtggaaggaaagtagaaaaaggacagggtcaatgtggggtaattttgaaggcagcttttctattgtcccttcttcggaggatggacttgatatccagcccaaagtctttattttccatttatgccccagaaaatttcatcgcctcctgtccttcctaggatcagtccttgaaactgtttggctgccgcaaactttagccccttctttcactgttgtccccttggataaccaacataaacaactcagggttggttcaggaataccagtttggcagggtaaaagttgccctctctagcctagctctgactcaagctgccttcctccagacaacctctcctacattgagcacatctttgagatatcccgccgtcctgacctactcactatggtggttgactacagaacccgtgtgctgaagatctcagaggaggatgagctggacaccaagctaacccgtatccccagtgccaagaagtacaaaggtaactgtaactggccatgccttgggcatagctacatttctgcttttcccctctgactatattcttaagagtggagaatcgtcctgaatttggggagtagagactgatgctcagtgggcctgcctagcagccctggacacaccccatctttgcttttttcagacattatccggcagccctctgaggaagaaatcatcaaattggctcccccaccaaagaaggcttgagcaaaggggaggaagaggaggaaggttggatcttcatcagaccactcccttccccatcctcaatgggaggggctagggcaaccccctgccccgtacccacttactaacttggtcctaacccccttactatgcgcgtgtgtgtgcgtgttcacacgctctggctgtctgtctgtctagctcatctagttcctcctcctcgtgaggggactggagtcgggaggggggggcttaatttccccactatagggggaagtggaagctatttctatgtaaatagaaatgggcacattcctccttctcccctcccctccactcttcccgcattttcctacactgaggagctaaggttaagatgaggtatgggagagatggtgagagttaaaaccaatggggaaggaaggtaagaggctactcagcctctacctggaaggggaaagaaaacccagaattcagggtttgtagatctatgctggactggctagaatccagtttcttgttattccttaggctgaagtcctaagagccaataggccctcttttatgcccttgtcatgggcctgggatgggtatgagccagaaatcttaatgagaagaccactagagcctttcctggcccccaaaatcaaaccccatggagaagccagcatttgatgtccccaacttctgctctggagagactatgctgggaccatgtactactgagcctgagatagggatgcaggtggagacaggcccaacttctactcctttattcctaaatacagactgttgaatatactgaccctgagcctaaggaggtttgggggaatgagatctataggttttaacctcaacctgcccatacctacagggtcccaatatggatattgtaggtaaccttcacaccagtctccagtttagaataccccaagcaagaaagaagttaatcatagtggtttcctttgcacctattaccaccccagttcaatccaggaagggacttggttaacctttctcatttgggtttgtggatgcctccaagccaagtcactagagtacagtgagtgaacccagcctcctacctgtcccaagatgcccttccccatcttgaccgtgctaactgtgtgtacatatatattctacatatatgtatattaaacccgcactgccatgtctgccctttttttgtggtttttagcattaacttattgtctaggccagagcaggagtgggaagggaatgccacagtgaagggagtggcagagcaaaattgttacatagtccaaacagcattgaaatcaaccacagcaaacattaaatttacatgcaagctcagagactttttagaggaagcttgaaggtaggagcttctagggtgtgggagcaaagctccacggggggtggggagtgggggggcaggctgtcagaagagggaagaagccagactggctagcgtacccccaactcctagcccagcccagtctgcccatccccctggccactgctgcagacacctgccttaacacacacacctccaagactccagttttgccttaaaggtccttcctgagactccctaattctgtctggcttttcctttaagaaaggggatacttgtacgactgggagaaaggaaatcagtataaaacatccttccatctgggatggtgcatgagaacaagagtgagatggagctttccttatggaggaaacacgagaggagagagggtgcttttcagcaatttctctgtaaggaaacaaacaaacaaacaaacaaacacttttaaaaagactaacctgccctaatagactgacctaccctgctacctttgtgctgctatgaggttgcccctagtccatgctcctctgtctgcagcatgcatagccttgttctaaccctggaataaaggtgactgactgtgctgtacctgactgattctagaattctgtgagtcattaagagttggggaacctctgaatgactgggaggggatgtgtagccatgccttccctattataattcacttctgtataaaacatgggcctggaaaacacccccaaataacatgccccgccacctctaagtatcccagaccagactttagcagaatcaagtatttatactggaaggaacaaaagtactctgtcacaaataaatggaccacataccacacaagcagcagtcgggggggaaaagctttactgagaaaaaatacaacaaattccagagtgcatggttttaagcccacctcataatccccctagcagtgcgactactcgcttacttcactccctgcctcaagaaggaaggaagtacacaactggcatctggtctgagctgctaggaaggggtcaggaggaagaagtgtgtaggaataccaccctctgctctttcccccttcttcttggcccagagtggtcaaatcaaaacgtcccaggatgcaggattcctgattgaatcttgtgaaaaccagggggagagaaatagcagcaaaagcatttagggcaagaattcaacagggactttcatacttgggtgtctaagccccagtcaccagaataaatcttccaattactggcttgtccctcaattcccaggaagttttcccttcatccttccagtaggaaaggagctggtatggagttgaatggcttaaagaatcaagcagctaaaggccaggggttgagtgtgctttctgtcatagcagaaccagggtaaggtctgcagcgatggtgcccttcctgaagtcacaggccagtcatgttttaaagacaggccagcctccaataagaggagcaatcttgggatcctccataagacttaagggaattagaagacctgaggcaaagttgaaaggaattttctgtttttccaaacctctgcaccaaggcagagaaagaagggcacagccaaatatccttccgtttttgaccttataaaacctaaaggtaggccccaggctctgacagccatatataaatggcaagctgaccccacatgtcacctctgcatcatcagtctcgctcattcttcctttaagtccctttattgcattgtattcatagagaatatataggtatttaaactttcgacaataattttaacttgatacatccaagtttaacttgcttttttaatatatttatagatataaaattaggcctctaacagtgatagggacagggaaattgttgccaccaaacaattaaaaacaaaaacacagaggtaacttcttcctgttcttccacctcttgccccctccccacttctccacagcctccgtcacagccccccacttagagagtgacggggtggagagagatatggagggtatgtaatcaagtgtaaaccctgtgagaagtacagagaatagtgcagtgacggaagagaaaagtactgggatggtcagggactcttaaggatttcccagaaaaacaaggtcctgggatgtggttgctcaggggcaaaaaaacaatggaactgtcagatttcttaaaaaaggggagaaaaaaaaaaaaaaaaaagaaaaaaaaaaaagggggaaaaaaaggtgaaaaccctaaaccaaagagagtggcattcctaccctcttctctggccccttggtactgaacagccagtccttcccccaccccccacaaaagaaacaagggaggttaaagaaaaataagccccatttcctatccgagcctgttaaccaaaggcttcagggagaggcccacttctgctgcatcctttgcgcctttccatggaagctcatgccgtctctcacccctggggctctgctggctcaatcccctgtggtctgtccttctcagacgtgtctcttttattcaaacaaagtccaaagtgcatctctgatgaatgtaagggcctggggccaaaaaagagctgcccaggcagcactgggttggcagccccagcccatccctaagtttggggcctcaggacggcatgcactgcacccggtcagggccctcctcctcgtcggaagtatctgaggaactgggagactcatcagagtccgcatctgtggccccaaccccaggttctcgccagcgctgtaggatgggaaatccttgttagtaatgtccctggatcaaggacaagacatttgatctagaatggatccatgatcagcagaatttttttttttttttttttaaatgaagtaacctaaggtgacctgttacttactcccaatcagcctaccttggcctccgctgtagctagaattacaggtgcttgctactgtacctggctcagactgtgaatttctgtgggcataaggtctctgttagaactgttcagctctgtttctgtaccttgaaagcagccacagataatacagagaataagtgtggctccattttcaataaaatttgtttgctgacccctgctctcaacctcttttagcatgaaagttaatacaggtcagccagagcaattatttcttctctactcccccccactccctcctgctactgcaactgtaaagataacccaccctttggagggatatatggtgacagagagaacacaaccacacacgacctcctttctaccggttgctctactagggataaaggccagtggatgagatacccaaccaacgccactccattcctctttaagtagtaaggaagtggtgtgaaaccacttctttaaaggcatgtggtccttgggaactcacttccaactgaaacttacccgatgatggcgtctctgtctcaggtgatgcataaggaaccaaagcatgtggctatcaaacaggtccgtgtgatgcaagctgtcttcatcccgttctcgcttgttcttcttaatcacctggaacccagttacaagaagggatactaatgaatagaaaccctgggcttgaccaacaagactggtgtttgcataggactataacccagcactggaagatacggataggaggatcacaatttcaaggccagcctgagctacatattagaagcttgtctctgaaaaccaagggctagctagattgtagttcatggtagggcatgtgcaaggccctggctacaatccccgactctgtgggaaaaagcagacttcgtctttcatcccaataaaacattccttcagataccattcagcttatgtagagctagttagatgtcccttgttggtcactgagaaaggtagacacttttaacatgctgctctctggctcaggactgtccccataaagggaaagtagaggaggtgttagagcagtgcttttcatgaactgtgctagtccttcttatggcagtgaagaatggcaccctcacacccatttgcttctataagggaatgccgtcagccagtcacttacatcctttaaccctgtcagctcagtggaagcttcagctgtgggtgcccagatcttcacatcatggtccagcccactggttgccaaaacaggtaggtgaggatggggttcaagacagttcacctggtttaggaggaaagaaagcagaggcttaggagtacttgggaatagagtttactctggtggccttgagccaaaaacttgcccttgacctgggctgaatgaagcaggaccaccaagcctagaccaaatagctctggcagtagaggagatacaaactggatacaaaagtcagcctttctatcatttccaatatgtagataaggagaggctgcatccctagacatagccccaggagcgggtgaatgatagataggccatgcatattgcagcttcacaagacaatgaggcacagaatctaaagctccaacttgcccaagactggaaaaaacatctctcagtgattttcatcaattgacaacaattaaaaaaaatttgaaaagcagcagctgcccctgcacttcagagaaaatggagaacaattatatccacttggtgctgtttactaactggaggatgtgttcgaggctgagaaggtaacagaggtttgtgtgtatttaagagcaccctgtcacagagggcaacatcctgctatctgccctaagggcatagtaaacttggctgcagggaagcccgatatagccatgcagtttctccaccgaatcagtttccctcattcacccaacaggagaaaatccagtggagcgacagcagacatttggtctcagagagtttccttttgtctaaaagcacccatgccctctgctgtctgactagaaaacaaggagctcccttaacggggcaaggcaaggcagggcagggcagggcagggcagttcccatccccccaccggaagagccagtctcagatctagctgctaaagcatttttagacttttagtcagatgaggaacagataggaaaaccaccccgccttgcttctgctctatagtccaagaaaataaaccctggcctggcaaaagcctctcctagttctccctctggaccaaccttggctgctgtgcctgcacactcagaccacagctgagggaaaggaaaggcaggcacagagaataaagatgaattcattttctttaactttgagtttacaaataaaataggctcagaaggccaaatctaaatctgagcctaagaataacacagaaagcccaattctcttctgctttgatttcacacatcagctcactgcagtttcttttaggctgtgtactgtggagtctgaggaagcactagagaacaaactggaatacaaaaatgttatcaacagcagctgatgacttacagtgcaaacctgacctcacttatctttctcctcatgaaatcttgctaaagtgtactcttgagcttacaacaagtgaacaaaaaaaaaaaaaaaaaacttaaagggacaattccttgggacttaggcctaaggacagagccaacgacaaaaggacaacagaataaattatatacaataccagagttggagctaacagagagcttctgggccaggggacctcaccagacctgtctgaatgccaggacctacctgtcaataatgctggagcagagaaaagaactctggccttagaagactgtgtgtacatgcttgtgcttgtacgcatggcgggcctaaagtgctcttgggagactaaggacttgttccttgacatcatctcccactcttggtcctgggaagttgaatgggaacaaagaaaggatcccaaaacaaaaactaggagacctgggcctgggccaggtgggcaattacgtctaagatccttctgatgctaacattctactttataacacagaatgcttcatcgtctatactgaggctggaacctggtgacctctattgctgaaaggttgtaacaaaaaccaaaactatcacagagggaaccaggtaagaacaacatggatcatttgactcacgtaaaggtaagaagaagtaaagaaactgttgggggtgtgtgggggagagacagccactacatctcttagaatcacaacaactctggctggggcccacccatcctaagaagatactcttcctcttgagcactggattaatcaaaaatcctggtactggctgagctgaaagcaaattggccagcagaatgcttctggagaaccaacaagggctgggagaggacattcatgcctacatctttctgggacagagtgcaagacaatagtttatgatcaagaaaggactcactggccctttttgactcactgtgtgcctactgtatacttgtctataagattccaatgtttgtacttgtaaactacaggtgacaaaggaaaggaaatagtagagaagaggaagacacatcttgaacttatagactcctctcctcttacattcagggtacagaagctttatgtgccctacgtccaagttttagaggaaaccagaataagattcaaaataccctgataagcagaccagaaaacggcaagaagcccctctctagtgagcattattaagtcacagctggcctctgagttccccgcagctcgggaaaatgaaaaggatgagagccagagcagttctaatcatgccttacaagatgtaggtagccaaagcattttgggtaatctttcaaactgtctctttcctttcttcagtggctcaaaaaccttgttataaaaaactatttaactctttcctaatgctggatcttaaaaaaggaaaaaaaaatatggtaagctaaataaatacatcatgagcactgaccattcttcactaacttgattttcatgattctttcttgagccattagcacagaggatgcttgcaaaactctaaggacaggcacacaatgatatgagcatattatctaaacaagctgttcacctgttcttttcaagaaaaatatgtattttattacatttgctttcctttctacatatatatacaggtacattatgtgtatctgtatccatttgacattagacatggcactttatccctaaatacggcacctaaatagtacatcaaacaaattcaatattgaatgccatgttacataacttacaaaccatacttatttcccctaatattcaaaaaatgtttcttctaaagtaaataaaaaaataaatgtgcgtctaacttttctctgctgatccaggaatcagccaaggtcctgcttggcttacttagagccaaggcaggaggtatcttgttttgatgctgtacaggaaggtttgtcctgaaacagtgttttcttttctttttttttttgaaaaagcccatgcctaagaagtttcttcttttcaataaactataccttgaaagggcagaagaaaggaatattaggaagtattccatcaaaacctcagcactccttaaggcataacaccttcaatttagctgtatggaacacattttaaatcagtggcccatgtaagacccaccttactgacttaagaaactaggggtcagccagtccagcaccccatactcaccacacctcctttgtccccctccatgaactgaatgatttggcaagatgacttctcccagaggaagatgtgcccacagtcactaccgctcaccacaaactcactcttggggccatagaaattgacgccttttactgaaatgatgagagaagaaaccacataagtgttggcacctggcctatatttatttacctcacaaactgagtcagctgaatgccaaatagttcttttcatttctacaagagattgtgtatatgatagataattataagagccaccccagtccctgagactacattctcccgaagagctttatcaggagtctacttttcctgggctaccgtctgcttcagttatactttataatgatctgttccaacatgattcatttcaactctgcccattcctgggccctaggattattcttggtatatatcttattggtacctagttggtctgagactgacaaaggtagatggcacagtcacctgtaagaagcatcactgccagaattcaggaaaagggctcaaatcttgagaatttgtgaaagacaggagtccaactattagaaccagttccacataccagccacaatactgacaatacttttccttttgcttgcccatataatgaaatccaaacacagaactctgcccctctttccttcttaccagtcaagaggaaaagtaaaagttactactgcctccaaatcaaatgacgacacacggctgagaggaatggcaccaaccaagtgcagttaattctctacattctctagattagacctgtcaggacacttaaaagcccaatgctccaagacatcgaatgtgtgtggggagaaaggcatcagcaaatgctctcttattaaaagactgaggtgagcccagtgagctccaatgtttgggaaccactgacatagaactaaaaagccaaacttcactggaaacttgggctagataccaccattattccccctactacgctttattcaaaggaatcattcccttctctccctcttacacacattatatgtgattacgcactacggttttacctaattttctaaaaggaaatctgtgcctactctacagtatctgaaatcacagaaagtcaagtctatcttcatgcttaacccaactggaggcaacatcactgcagtgaagacgctaatgagccctccctgtatcatattggagaaaagaaaatctcagcctgactagtaataatctcataatgctcaagttgacacaggcagcctgcttcttaggtagttcccacctacaaaatgggaataagataatgtaggttttcaacgtgacttgagtcacagaaacagagacaagcagactcacctgtagcattatttctatgacctttgtatctcttaatatactgggccccatcactgtgagaagagttgaaaaggtaaatgtcttcatcattgtaactggccaggagctctgccaagaacaagaacacaacagtgaaggcaaaggctgaaaaatgcagagaccaggagatttgggggtatgggggttgtctaggatggggcttcttgctggtagtgaatcctcttagcacccacataaagcacccatcttacttgtttggaacagcaggcaaataagattacataggatctacaatgaacacattaccagcccaggggtagtagaacactcaggagatcacaccctctaacttactaagtaatcaaaggcggtagaacttgcttaggctagtggtttagtttcaagacaagcctgtgaaatgtcatctgaagcctgtccacaggtcatctgctacatcctcccactgcatgcttaccgtcagtaactattcccagctgttgcacttggagctacagaacagtgttgaacactggagggcacatgcctcactggctcagcagctccctagacagaggaggcatgccagcctaggagctggccctgctcacgtacctgtgccgtcgtggctgtacacaagacaggtgatgtttgctttggactcactgttcacctgcaataaggagcagatactgactgatgcccccacccccaccccatttgttatatcaacttcaggaacaggtttttctagaaacttttctctatcttttcccagagacaaaaagacaagagataaatagaaagaggtagaaggaggggtgagagtgagttatataactgaggaaacatgtccacctcaagaagcagagtcttagtgaggccctctcctggctctcttctgtgtgctagccatttcagatgcattatctcattaggcctccactttgttgttgagagcaccagggctagaataggtcaacgggctgcccgagatcacgaaacttgtgagaaaatcagggttaaaatctgtctgacttcaaactccaaactcttcacattatgccaaaaagtttggaggcagcataggatgaagtcatggaagccaggagcccctggtccttcatgaatcttaccaagtgatgaggacagaatttcttcagcactccattgttctcattctcatcaattttcctctggtcataaatcctttaatgaaagatgcaaaatttacaaagtgatcccttgcagagttgtaagacacaggctctttcctaatgaagcttttgctttgttctcttcaggaaagctgttcccctctctaatccatctccaaactttgccttatccaggtatttctcataaagcagtaatactccgttatatccattggagtggctaaactcaagttttatgtcacttactgtttattttagtggtggtaagtttcatgtatgtgaaagccaaaggacaaccttgagtgtccaaatcctttacaacccctcctatctctgcctctccagtactgggactgcaagtaaggaccatcccatctcacattttatgaactgaactacccatctctcaagccccacttatggcttattttcactgaagcagttaataccatactttttctatctatgtggcttatcccaaagcatttattactctatgggctgaggaggtcttaagtcctttgaagtttctttaaaaaaaaaaaaatatatatttatttatcatgtatacagtgcgtgccagaagagggcaccagatcacatcacagatggttgtgagccaccatgtagttgctgggaattgaactcagaaactctggaagaacagtcagtgctcttaacccctgagccatctctccagcccccctctgaagttttttttaagatctatttttatttatgtgtatgagggttttgactgtgtgtatgtatatacatcccatgtatgagtgcagtgctgcaaggaatagaacagttgccagaccccagagaactggagttaccgatggttgtgagctgccatgtgggtgcagatcctctgaaagaacagcaagtgttcacacttgcggaaccatttctttatccctccttccttgaacttctatttagctagttctccttctcatgggccacaaaaactatccccaaaccaccatctttaagtcacctgtagtcaactactcaaaatgttgaatgaaaaagtccagaagaaaaccaattcactagttttaataacaaaacaaaactcagcacctttagggtttcttactattgacaagttcaaagctaacaccagagaatacatcccttatagattaggggaaatgactgcattttcttttgatgaggaaattctattgccacactttgactaccactagctccctatatctggaaatatgttttaaacctgtgtctcttactctgagttccagacgtaacatctaccaacatctacttaacagcagatgttataataggtggtcaaaaggaaactcattttccttccaaaactttctaaacctatcactccccctcaatctgttaatgacactgtccttaacacaaatgaccaagtctcttacttggttgtgctctctctggagctcattcttccccccctccccatttaaaacttatttttattaaatctttcttaatttcataaatgaatttgatgtgtttttttaaaatcatattcttctcccactcctccccaggtcttttctcttgtacaaatgatttacttcttgtcagttcttctcctgggtagactgttttggttatatctgcttttcccacttacctccatcatattttgcttacattactgttgatattccttctgatttttctgctcatgttgccgttagaattttattcagaatgccaaactttatgtaagttctctatttaaatttcctcagtaatttctgaacacttttctggaaaactcaaacttcttagaataaatagctacctacagcctcctcaagaccctaaacattatacccaaacctaactatgactttctcaagatcctgtacattactcccaaacaaaccaaagaccacaagaaccacctgtggtcacgctagatacagtagcagcccacactcgctatcctagcaggagttaagagtttaaggccagccacagctacacagaatacaaggctagcctgagctatgtaagacactgtctccaaaaaaaaaaaaaaaaaaaaaaaaaaaaaaaaaaaaaaaaaaaaaaaaaagaggaaagccttttccatgtatcctgcaacatacactgtcacaacttagtattaccatatctctacctatattgttctttttacctaaatttgcccaaatgtctttcattctttctgtatgcaaataaaaaccacaacaaagtgagttagtttccagtatattttagttattacctacttactcaaataatactggatataagctccacgtaccttacatattttcttacacagtagatgctaataaatgaatccatgtatccttggtaatatatctaaacatttggtataaagcaaataccccagaaatgtttactaaatgaagccacaagcaccaatacagcaaaatggctatattactcctaagtaaatttatcaactatcatttttttcctctcttaactaagtttaaatcaacaactcttaaaaaaaaaaaaaaaggtaagttaacagagctcaaatgtccctaacccattaaaaaattcagtaaatagtcaggcatgattacacatatctttaatcccaatactcaggaggcaaaggcaggtagatcactccagccagagctacagtgaaactctgtctcaaacaaacacacacaccaaaattagtaaaaagtgctaaatattcaaggtctgtgggatgctctgtggcaaattcatcagcacccaatattctagttgtcttttttttcttttttttttgggggggggcggtttctctatgtagcaatcctggctgtcctggaactcacagagatccacctgcctctgcctcccaagtgctggtattaaagacgtgcaccaccactccattgtttttgtttgttttggctttaggtcaaaaagtatgtttctttaaaccttcctttaaatgctttttcacaaccctaaactaaaattcagcaacaattatgtgaagtcttgaggttgactaggccatctttctgtactccttgtttctttcttgaaagaaaattgcagttgtaaaaagctatggtgtcattatacacagtatgttacaaatgttttcaaatttgtaccagaaaatatcagagcagaccagggtgctgaaaggattctctactcatgtagaatcagtgtggctcaaaacctgtatgtactactgacaagtaaacaacctactgtgtagaaaccggtgcacaaaggtactgaaaacactgacgccaataaaagatgagtattttattcctctctttgctgaaatgctaaaacaatcctcagccccattttagtcctgggaaattataagctgtggaatagggtactgaaactctattaagatttttggagtaagtcaatactgccaactcatcctttcctctttaaaacactttggtcctagtgtttaaattttccataacttttaaagcaatctaattctccaagagaaaaaaaaatttcaactagaagttcagtgatgtttcagttcaacccatgacaacataccttcttgatcaacagcatcttatattaaaaatagggggctggagatatgggccagcagctaagagcacctcttgcagaggacacaggttcaattcccagaaccccattgtggctcacaaccacccataacttacttctagggaatccaaagccctcttctaacctctgtgggcaccaggcacaccatgatgtacacacaaaataaatacataaaataatgctatacatttaactgactatacatttaagagacaaattttaaagagagtaccaaattatccagaactcttgaacaaagtaaatctctattttctgaaagcttacctcataattctaatacaagtaatttcaaaataatttttaaaatgtgttttcatttgaaaagatgtcccctttcaactaccagcagaacagaaaaacaaaacaccatttttctaattatgctgtccctcccttttcaaactgacaatcccaaagaaatgtagttaaaatacagcagctggctagctagggaataagggtcggaaggaaaacaactggtacaatggggattgaaagaatgatgtctgttttcccttaggatgtgactgaatagccagtgttaaaaacagatgttcacagtaacaaagatattactacagataaagaaaagtagtccaggacaacagaaacaaaaatcctcagttacagagtgttctcaagccaaatttttctaaatctaaccagtgctcaacactggtagtgtagagttgtccagatgattaactggctagacacacttgctgctccatgatgcaagcctcacaacctgagcttgattgtttgatttgtgtaaaggacacaacacaatgaatccacaaagttgtcttacgacttccacacgcatgttaaacatgccctatggcaaacacacctcatatatacatcatacttacacagataatactaaaattaaatataaaaattatttgaaaagattgctagtacaatgttcacttatagaaaaatagtggaaaacacatacggatttatgtcttaaaaccactatgtgggacaaatttatcattttttttaaagattttatttacttatgtatacaccattctgcttccatgtatatctgtacaccagaagagggcaccagatctcattacagatggttgtgagccaccatgtggttgctgggaattgaactcaggacctctggaagagcagtcagtgctcttaacctctgagccatctctccagcccccaaatttatcattctttaaaatgtgataatcccaggactgaaaatatggcatagaggttaagaggatcaggatcaattctcagtaccaatatggtgccagcaaccacctctaactccagaagatttaacattctcctctgaattccagttatacaagcaagcaaacaaccatacaaataaaatatattcagtttaaaaagtaataatccctgtaacatgaagttcctcagattgttgtgatagggaacaaaatgtctcagaaggggcttaagcatttctaaaaggttcaacatggtagttaatgaattcctacaatttgctaacttagcactggggagtatatagcaatatacaatataccctaagtctcaaaccctcaaagatacaaaggactgacaaactcaccttacaaactggtctcgcccacctactgcaaactggtgggtattggcaggattcacatagattgtatacagccccactttcttctccttctcttttgtcaccaccagtttccttcaaagaggagaaaaagtatacagttatactgtccaaaagactagatggagctcagcatgataggtagctcagatctgtaatcccagcacttaagaaagaaaaggactgccaccatggcactcagaaggcagaggcagaaaactcgtgatttctcagccagggcacagccatgacttccaccctcagcaccacatgcctggaaaccccagccctcaacagacagaggcaagatcaggactgaagtcatcctgaagtcatctagaggtaactctgatcaaaccatattatatgtacttgaacacgtgaaaatgaagccatcattttgtataatatatgagataataaaaaatataagctggaaaaaaatacaagctgggactaaagagatggttcagtggttaagagcactgtctgctcttccagaggacctgagtttgattatccacatggtggcctaccactgtctgtaatcccagttctaggggagcaatgtcctttctgacctctccaggcactgcacttacatggtgaacagacagacatgcaggcaaaaatacccatacccataaataatcaatttagaaaaatgaaggtaaggcaagagcatgtgactgagtgtattgtaccttggttaatgtgataacaaacacctggagattcagtgtgtgctgcaagaatcatagcaacagggagctaaaaagttctagagaataaagtctatctcccaagttttatggggaaaaagtgactgaaaacctagctttgggattagagagaaggaccagccagtgaagtgtttgctgtactgagttagagctagagctcccacacacagaaaaggctggacgtgaagatgtgagcctctaatgtcagtgctggggaggcagacaaagagtggtcccaaagcttgccggccagtgagtcttgccagactggtgagctccaagctcattgagagcacctgacaagatgggaagctggcaagtggctggatagggagttccagactcaggtcccacaagaggacatgccctctgactgtcctctgattttcacatgcacagcttgacacaaatgtgtgtatacataaataaataaacaaagataattaaaaactgggtcccagcaagatggctcagtgggtaagggcacttgcgccaagcctgacaacctgagttcgatcctcaggacccacatggtggaaggagagaaccacctccctcaaactgatgtctgagctgtgcatgagtactatgcatgtgcacacacataaatgcaattgtaaattaaacaacaaactaggagagactggatttgtgaaaatagctatgtataaaactgaaaatgcacttcaaagttactctggttataaacacagaagtatgatatttcagatgatggtaatgtcgtgggaccctaagagaaccccttatttacaagaatttagctaaccagccataattcaccccacattaagaatagttctacagaacttttcccagatctattgtcaatttattaaacatggtatcatgcagattactaaacttatagttaagacatcaagaaactactactaagaggaacctgcgctggagagactgcccaaatggcaaagagaactggctgctcttctagggaacctgagttcaattcccagcaaccacctggcagctcacaaatgtctctaactccagtttcaggggatctgacactgtcacacaaacatgcaggcaaaacaccaatgtgcataaaataaaataaatgtatcatttaaaaaaaaagagagaaactgccaggtgttggtggcacacacctttaatcccagcactcaggaggcagaggcaggccggttccaggacagcctccaaagccacagagaaaccctgtctcaaaaaacctaacttagagaaacctaacttagattttgttttttattttaagcttttattcattttagaataatggaaatggaaacaagaaaaagacagccaccacaacaaatttttttcgtaaagaaatatttagcattctctctgcatggtcaaagtcgctctagcctagaactgttctggacagtgagattttgattctaaaatctatacagctttctattaaaagaatacagatgccaggcctgatggagtgcaaaggtaggatcatcaggaattcaaagtcatccttgactaaactatgagtcctaggccagcctgggctatatgagacattatctttaaaaagtatagagatcactgaaaagcagtcactatgaggaaaaagtcacatatacatgcacacacatacatgtaaccatattcaaaaatactaacaatgattatcaatagctagaaaaatgggaaaagatacataagaagcatctctattttgtctatgtgttttgattatttgagtttaaaaaaattattgtaaaaccaacaaaaatgcagacaatgtatgtatatatgtatttatgtactataggacttctagaaaaaagagatacaaccaaggatcctgaagctatgaactagtaataactggattgagatttgacttgatctgcctggatttacaaaagacatctgtttctccaccagtgatggctcagtgagtaaaggcacttgatgtacaagcctggtgacctgaggacaagccctggaatccacataagggtaggaggagagagggaaaggggacttccatgtacagattatgtataatataacaaaactctattgtagcattgtagggagacaccgtaaccatgcttcctaagagctggctataggtgtgcttaaccacgcctgtcggggcgtggtcaggggaggctcaggatgacttgtggggagttcttttttatttattatgtatacaacattctgcttccatgtatatctgcacaccagaagagagcaccagatctcattacagatggttgtgagccaccatgtggttgctgggaattgaactcaggacctctggaagagcagttggtgctcttaacctctgagccatccctccagcccaagtggagagttcttaaggtgcggcagagacatgggagctcactctcaggcctccctagcctgctgcctctgggcacgctctgccttgtgctgggctggtattattaagatatcttaacctacaacctctcagtacatagcataaatcttattttcaagacttaccctttattttccttatgtaatttaactggacatttacaagacaatctcttaagctagagtgtagagtaatgtgcctcttctggtaaactgaatgtggatacttaggcgaatggagaacagaagatcaccaaatcactaaagcctacctgtaaagagcgagctttctctgcaagagagagttaggcatttcattcacacgggaagtaaggacctctgcaaaacctaaagctatctcttatcatacacacgctcaaggctaccatattttagggaacctgagagtttaccatgacatgtagagcattttcaaggccaaggaatagagttcagcaaagaaaacatgactatgggctaagagatggctcagaggttaagagtacatactgctttggcagaggaccagagtttggctcccagcatcctcattgggtggcccataaccacctgcaacgctagcttccggggatctttctacaggcctctgaacatctatactcatgtgttcatacccccacacagatacacacatacataaaattaaaactagatcatcacttcaaggccttttggctaagatcaaatataaaaatagaaagcatctgtgtgccctgactctcctccaactcagagatccacctgcctctgcctcctgggattaaaggcatgccccaccaccacctggttaaaactaaaacaaatcttaaaaaaaaaaaaaaaaaaaaggttaaacttacgaagctggccggtcttgtctcaggtcaatggtgaagacaacagcatcttcaccagctgacaggaacgtacaaggggagtctggttctagggccaactgtaggaaagaaagggaaaggatgtagtttctaaatattagagggaatatctagttcactcacttacctttaagaagggaagtaattaaaatgtcttagcaggccaggcatgataggtatacacctttaatcccaacttgggaggctgaggcaggaagatatttgtgagttcaaggacaacctggtctacatagtgaaactatgtccaaaaaaaaaaaatcttagcaaatgaaatgtgcacctttttttgtttgtttgttataaaatcctaagaagggaagaaggggcctagagaaatgactcagatgttaagagcaccggctgcttttacgaggtcctgagttcaattcccagcaaccacatggtggttcacaaccatatgtaatgagatttggtgccctcttctggcatgcaggcatacatgctggcagaacactgaatacacagtaaatcacacacacacaaaaaaagttcattctaagccaggtatggtggcatgaacctttagtcccagcattacctagggagacaggcaggtttgagttggaggccagcctggttgacacaatgagttccagaacagcctctctacagagaaaccctgtctcaaaaaacaaaaaagacttccttcaggctggagggatggctctgtggttaagagcactggctactcttccagaggaccaaggttcaattcccagcacccacatggcagctcacaactgtctgtaactccagttccagtggatctgatacctttacaccaatgcaaataaaataaagttaaataaattattaaaaaaaaaagactccattctaaaataaagtccattacatttaggcgtgcagacaaatagtatagaaacttctttctttttctatctctgtatcttaactctaaaaattagttacctagtaggtgggaactagacttaaaaatcaaagtgaggggggaaaaaaaatcaaagaagtgggtatttttcatattcttgagccttctggtctcctaatttccttaggtttttgtaagagtatcatcctttttttggcatggaaaaaacggtatccaccagaaacactgttttttaggaacttttggacagctgttaacaaatttggcagccgaatgaagtacggcaggtgaagacaaagagaacacaagggaaaacgctggctgagagccacagaggatatggagtcaaaatcttggaacaaagggtcacttaccttgtgggatgctcccttgtgctgggccacacgctttgtgttcttgcagcactgtgtagcagacagttctgctacacggacctgcccgtcccgggcacacatagccaaggtggaatcaccactgttaggaaggaacttggcctggagtagcaaaaatgaaaaagggacacacaaaagaattaaagaggtaaatttaagagaaaaaaatgtgttgatgaccccttgtcagcctttccttgtgcagctggatgtaactttcctattctttgtacagatagcttatcccaaatcctttcagaggtaaaaggaagagaaaggaagtcacttctgacataaaagtacattctggatggctctggaaggatgaacactacattactaagcactggtaaactgcaattgtgccttacagaggaaaaaagcaagtaataagcaagaacaaatcttcatttaccaaacaaacataaatttgccacgctcgaaagaaggaaaaagaacatgcttatggacggagtggctagtaccagtatggacaatgggacaatacagaaaggtctagtatctccatagaataatcattattagccaaatgttatcaaatgtgattaaatatcagccatgaatctaagtgctcagctccccttcttttctttttcttgaggatggaaaaaagaactcagagtcttagcaagtgccctactactgagttacgctccaagtccatgcactgttacttagtgctgataaaatgagttacaagtcctatttcaaagacacataaactccaatcacagctcactactagcttctgttcttgacagcaactcaatatggtctaccctcacacttcattttctcaagttgctgtggtgtctctctgccttacctggaagacattacttttgtggccactctcaaagtccagtactggttgccgcctcacccaatcccacaccaccaccttcaggtcatcactgccactggccagccaggtgccacgctggttaaagtgcaaggtattgacacaaccggtatggccctcaagcccatgttgcaggcggaaacgctgtacaaagactcttgccccacaagcctcatacacaaaacgggcacttgaacccagctcccgctcccgaagagcaggaagggctttccagcgaggtcggggcaaagctgttgtctctgaggatacccagtcttccagggctcgctcatcatctgaggagtcctgatcacggctggcccgtttgcgctgtactcggtgcagaggctgctcctcttcctcttcctctgagtggtcatggactcggttgtcatcattgatggaataatgaccagtgtcctccatgctatcagagtccttttcttcacctgagctctctgtgtctgtgcctcgactttctgtgctggtgcggttggggccaccatcatccccagtcaagctcaaactcaggtctgaggcctctacttcaatccctgaggatgtttccctcccctcttcagctccagacatctcttctggactgctagacaggcttcctagacattaatggagagatacaaaggaaaaataatcaggacagggatcagaaagactttgaggcactgtatgtacttcagacaccacaggcacatggtgtaatgacagcaggcaaaacatccatacacataaaagacaataaccaccctccctcctttaaaaaatataccaacagccaggcatggtagcatatatctttaattccagcacttgggatgcacaggcagatggatctcttatgagtttgaggccagcctgatctacatagtgagctccaggtcaggcaagagtacatagtgagaccctgactcagaacaacaacaaaacaaaatgcaaataaaccactaatactttgtaacctgtctactaactacaacagtgctcaggggtgaatggtggcatgactgtccagggaaaaccaactgctttctgagattgcttagaagggcattctccataggagagaattcataactaggaagcttagtcaaaagctcatggctagacaagttcattggcggtaggaggaaacttattgttgtcttgctgaaaagtggacatgtcaaactgccttctaaatatcatagatatgtgctcctttttttcagcgaacagtcattaatacagagacttgttgctggccaaagtgctaagaataaatggctatttagtgctcaatcataaataagacatttatagcaactaccaaggctcaggaatatcacaaaagaaggggcaggaagaatgcaagaactggagaatggggaagagtgttgaaaatggttgtcttttgcacatgacataacactgcactcatgaactcacagcagctgtggttccctgcgcatgccctgtcaaacaagtcagtcagcactccagcatagacaggggggactcatgaagccctacccctggctaaggagctattggcaactgatggttgctaggttcttcatgggtatggcaactggtagattccccatgctcctgtggatggtctcacaaccatgtgactgctggaagcaaagtaaatttaatgggttattaaaaaaaaaaaaaaaaaaaaagacaatgacagcatgaaggttcgaggagaacataggagagaaagtgttgagaggaaatggggaaaatggggtggatatgatcatgttaaagagtaaaatttctggccaggtggtgacgatggtgatgcacacctttaatcccagcacttgggaggcagaggtcagcctggtctacagagttccaggatagtagagctacacagagaaaccctgtctcaaaacaaaatgtgtacacacacacacacagaataaatcttaaaaacagtgggccaggtggtggccatacacatctttaatcatagcacttaggaggcacagacattcgtgcctgtaatgctaacacttgagaagctgagacagaatcttcatgagtttgaggccagtgtgggctatgtaatgagaccatatctaaaaccaaggtaactaactgaagttaaaatacatttgctagaaaggggcaagtgaaaacctgtggtaagtaatcataatgaccaactttaaatccttctactttaagattggctagcactatagctcagtggataaagttgtttgctacctgattgatgactgagtttgatccaggaacccacatgatggaaggaggaaactcattcctccaagttgtcttttcatggccacatgttcattgtggcacccccccaccccataaattaatgtcatagtaataaaaagtccttatgggagaaagttagcacttatgcagcaggaggtaggtgcttctgtgatttgggaaatgacataagccagtgtgcattttttcagttaccattttcccataagatggctgtcagtctacaagagctagttccaggacagcctcaaaagccacagggaaaccttgcctcgaaaacccaaaagagagaaagaaaaagttttgtttgaagtaataagagaagttgaacaacacagaagcatctcgccaaacttcctaatagtaggaaaactgggctaggaggtgggggggggggggacccacagaaatctgaacttaggaagcagatctgctgagaattacatatgctgattaagtatgtgtttaaatgcagttgggcttaagtttaggattggcaagaatggataaaagcacacctagagctgaggtacagctcaatggtagagtacctatttggtgtagacaaggttctgggttagatgcctggtactatatccctgcacacaacaccaaacagagccctagatgcaaggaaaaataagacccccctcccaaaaaaaaaaaaaaaaaaaaaaaaaacaaaacaaaaaaaactcttggaatttactgttaaaactatgattaacaagggctagcaaaatggtcgagcaggtaaaagtacttgtcactaagacctccagaacccacagggcaggaggaaacctcaaaacctgattctaccaaagtatcatggcacacgaacactaaataaatggattataagatttaaaaagttgtgaatatcaaattcagactgtgaaagtgggagcacactaatataagagagagagtataccatgtgcttgaagaaggggcttagtagtcattgaccaagatctaccttagaatctggaattttttcctgtacagacccagatggtctaagttacagaagatcttttatcatttccttaattactgaatctcacttgcacaaaagcaactcataaaggggcacaagtgtgtttggtgaactcttttttctgtgtgtggtgtgtgcatgttcgtgaggggaggggcacacagcagaggtctaaggttgacatgaggagccttgctcaataactttctaccttactgcaacagtcttgtcaactgaacccagagttaatctagctgggtagcttgtttcgggacctctcctgtctctactttgtaagcattggaattacacacacacacacacacacacacacacacacacacacacacagagagagagagagagagagagagagagagagagagacagagagacagagagagacagagacagagacagacagacagacagacagacagacagacagagacagagagagaaacattaatacctaaaatttctctagaatcctgtcccttttaactaatcccaatgtaaagggagagaaggaagacctgattctggatagctttggttttaacttctctctctgcctctctccctccttttggcactggggaccaaacaaagggtctcatgcattctatcactgaggcacactcccataccagtaacttgatttcttatcactttgaaactattatttaccacagaaagagacctctcaatgaaaagtctcccccaactccctccaccttacttttcctcttaagtagtatttataagtatactttggaatttactgttaaaactatgattatggtataatcaggctttcaaaaggtcaatgtatctctggggctagagagatggctgctctttcagaggaccctgattcaatgccagcatccacatagtggctcacaactgtctgtaactccagttccaaaggatctaacaccctcttctggcctgggcaggcaccagacacaaaagtagtgcacagacatacatgcaggcaaaataaccatacacaacacaaaaaattaaaaaagaaagaagcatctctgtattgatcttctgaaaacaacagataaaatctgaaagacctaaagtaacaggcaatccaagatgactgctgtgtgctttcccatactcaacacacaaagggctcctttgtcccactaaatccaggtctcctctctcccttagcaaagaaggggagagagacctcaactgacggtaaagagagtttcacctttggtcccttaccattagctaaatctgttctgccatctgtgctgctccctttgctggacatcttgaaaatggtatttgctgtatccagcctagatttgggaagaaataaaataattagaaaagccccgggaaagacaataaaacagacaaggacatttaatgattcattaggttttaccataagcactaatcttttatgtgggtacacttaatattactattcagttgctaaactcccctccccgcttccctggatgtaattccataaagacacatacttgggggtgggggtgttaactgccaactctttaccttctttcttgagtagctgatagtgttttttatttttccacatgggaaagaaggaactgagataaaacttgaaacagcaggcacaaatctagtaacaagttgctggttaagaacctcaactcaacacaagaagactaccttcagcactgccctctgagcaagtgctactgttaagtagcactcatttccacaaactctgtgaagcatttgtttctgcaaaatcaagattctgaatctcagaaatcaagctcagaaaggaacctaacctttggtcattcaaagacaaataagattataagcaggcaggctggcacacccctttgatcccagctattgggaggcagaggcaagcggatctctgtgagtgccagattggccatacaaaggtatgtaaaagagaatttctactaaaccatcttagctcattttacataatggcaaacattacttcaagggctggagaaatgactcagaggttaagagcactgactgatcttccagaagtcctgagttcaattcccagcaaccacatggtggctcacaaccatccgttatgagatcaggtgcactcttctggtgtgcagatatacatggaagcagaatgttgtatgcataataaataaataaaatctttaaaaaaaaaaaaaaccctaactagaactagggaatgtatctttttgttttgttttttgtttttgtttttggttttggttttggttttggagacagggtttctctgtggctttggaggctgtgctggaactagctcttgtagaccaggctggtctcaaactcacagagatccacctgcctctacatcccgagtgctggaattaaaggcatgcgccaccaacacccggaatctttaatgcttctataacactcctacccatctccagggccttactgccacctcctacaaattccaaatagcaaagaataatattgttcaggccagagttttgtttagccctttcagtgtcttgaacaaaaggcagtggtaaaagacaaagtatgattatgacctaagactgagtacccaggcaccgtcctccaatctttcaagagccctttcattcccctaacaattatcctagaagcccatccttatcctcactctctacttctctccttttcagaaacctatgctgtttcataaaaactgtcctctgcagaggcagctgcccaaagaatgcttgctgcaggccacagtagaaaagtagaaatactgcaaacaaacaaaaacaaaacaagcaaaacaccaggactgaatctgagaaaacatctataagatcagcgataaaagacagtgccaacaagatgtgaacagccatatacaagctatttccagagcagattacttctcacttttgtttcattttgagacaggatctcactctgtacctcaggctggagacctttctgtctcagattccccagagctaggatcacaactgtgagccaccacagctggcttctttcccccctttgatgtgtacataattttaaacaaaggtttgcgaatgagctttctgtatgtatgtggtgcactagtgtctgagaagatcagaagatggtgttggatcccctgaaactggagctatggatagtttgtgagccaccaggcaggagctgagaaatgagtccaggtcttctccaagtcaagtaagtgttcttaacctctcccatcccatttggatgtattctggtaaatacagcacttggttctgtctccattagttactatttatatcctttaacatctcagtaatctccccaaccccgaatcaacaggtttaaaattaattacattattgtaaaagtcttgtgaaataagtgaagtttttttattactgataaggcctgccacatatcatggtaaattagaagtagctgatatattcttccatttctggaattaaactatctaccacatcacagcctcaccccgccattattcacttccagaggataaagcagcagctccctaaaacctttctcataactaaagagcatcttctccgggaggctgggaatgtatgaacttgtcatattgctttagaaaagacttggccagcctctatgacctaccctgagaagtggagaaaaggaagacacgatgttcatctcatatccagagttcataggatagtcttttgggagagaaaatggtttaaggttctttcaaaatggtttcttctttgagttgaagttgacagattagtaaatcagaaacataaaaccctgtgaacgcttatacaaaccacagcaaacagttggtttctaaagataaaagtttagcaaaatcagtcccagactaaaaagtagcagttccagattccagcgaatgagaaaagctgttcataaactgtaccgtgatgagtccataagcttcactagactttctttcatctataaataacagacagaaagctggacatggcctatagtcccagtgcttaagaagtgaaggcaggcctgtgagttcaaggttatcctcagacacatagcaagttcaaagttggtgtgggctatatgggagcctggcctcaaaaacaacaaaacaaaacaaaaaagactgcatgcccctagtctcctagtctaagtatccaaatgcccccaaattgtgaaactttctgagaattaacatgatcctcaattagtttaaatttttaaagcatttcagatgttcatattatttgtatgcaaacattcccaaatctgggcttaaagtatggtttaatagtgcttggccagcacacatgaggccctgggtgggctcaatgcccaacactgcaacaacaacaaatgctaatctgaaaagctgaaatgtaaaataattctgatcctccacactttatggaaggaaggaatattcaacctgaaactattccagatgttatacactaataaaattttatgttaaaacctatgcagaaaggaacagtgatcaaaattttattaactttggatatctaccaatatatatgtatacatatacaatcagactgcattaaatattaaggtttattaatattattataatattattattaatattatcattaattattattaatattattatttattaatattattgaatattaaacatggaagcacaccttggtaatcccagcacttgagaggctgaggcaagagaattgccaagagttagaggtcaacctggactacatacagattaacagcccgccaaagctacataatatgaccaaccctatcttacaaaatggggggctggaaagatggctcagagctcaagagcacttgctgttctttcagaggactcaggttcagttcccacagggcaggtcacaatcatctgtaactctagttctaaggaacagggtgccctcttctggcctccacaggcatcaagtatgcatttggtgcaaagggcaggaaaaacacccattcacacaataataaaataaaaataatctttaaaaattgtaaaatagggctagcaagatagctcagtagtaatgtacctgacctggcaccaagcctgcaaatctgaatttgattcccgggattaacatggaaggaaaaaggactccaacaaattgtcctcagacttccatacatgcaccatggcacatacacaaaataaaaaaaaaaaaatgtaataatttttaaaaggcacgtaattttttctagactatatgccaaataaatactcaacattctttttctatacaccactggatcatcttacatatcctttaacgatattataaattcccatttggggaaccatttctctaaaaaaaaaaaaaaaagaagttatggagtcgtgggtaaaaaaaaagtgcttgccacataagtgttttaaggatgatttcaaatcctcaggcgccacagaaaaatcaagatatggtaagctcacatctgtcacaacagtgttcctatgaaagatgggagctagaattcccagaaacttgcagtgtagttagcgtagtatacacaggtgcaaacaaccctaccacaaacaaggtgaaaagtgaggaaagaaagccacatgaggttgtctctgcccctgacaggcatgctatggcatacttgtatacacacacacacacacacacacacacacacacacacaatgacaataacaactacacttgagagaagctataattctaagtttcgttcaaaattaaatacaaccaattcaattctagtgcagaaactatagtaaccactggctataacctgcaatgtgatagcatttaaagatggagtctttcagatacaatcagggttagctgaggtcataaaaacggatagccccatgacaggattaacaaactttgtgagagacagttatttctccctttctctctagcatgggaaggcacagtgaggaggcagatagatttctataagctgaaagacatccatgatctcttagattttaccctctagaatgataagaaaattaagttctgctgtctaagccaccagtcattggcattttgttctagcagccttagtccaaactaaggcaagccaagacactctaactgtgccctacaactttaataccatagccactgcagaatctcttccactgatcaacaagataaatacattttgattcaggcactaagcatcttttccattttcaatgcattatgtaccccaaaactccattgtttccactctggccaatcaatatgtaaaatatggtcgaacgaaccatgctgagttggaagagctgaggtcactgtctcaggtagctggagtttagattagctctactgcctatactctaaaaataaccagactcctgccaaactgaaggttaaagagtaaactattcgaggatggggggggggaatccaggtgttatttcaagttcagaagtaaatcccagtgatctagtttgttttttctgttttagtaataaatttttagctaactatgagacaaactattaactgaaagtcgagcagaaaaataaccaagaatctcttatttaaaaattgtcgggtggccaggtttggtggcacacttgcctttaatcctcaactgttaagcacattaaatttgaggctggtaaggtatctcagtggttaaaagaacatgctgttcatacagggatcagagtttggttcccagaacccacaccacctgtgggatccaatgaccctggcctctgtggacatacccattcgccacagacacatacatgccattttaaaaataaaaatagtggttttttgctttggtttgtgtttctctgtatagccttggctgtcctgaaatggccctgtacaccaggctggcctccaactcagagaatcacctgctgggattaaaagtatacgccactgctgctcagctataaattgtttttaagccactaaattctcaaggttacactattatccctattattactctggtggtttgtttgtaggagggagttatttgttttgtttttgagcagttattaccacatagcccagggcaacctagaactcactatgttactcaagttggtctcagacttgcattgaaccttctatgagaacattactgggttacacacacgagatgtcacggctggataaaactatcattattaatatgaataatattaattatattaattatactaccactgaactaaacctccatcacccctatggagacagtatattttttaactttccttcaattcagactaaatctagagcctataaaaactggtctgatgactcactccattttactttgggcctgacagaaacatctactaagtaacattactcgatccttttactaagaactgttttttgttgttgttgttgttgttgttgttttttaaggtggaaggcaaggatcaaggttggaaattatcctctgaccgccattcttttttttttaagattttatttatttattatgtatacaacattctgcttctgtgtgcttctgcacaccagaagacagcaccagaactcataactgatggttgtgagacaccatgtggttgctgggaattgaactcaggacctctggaagaacagccagtgctcttaacctctgagccatctctccagccctactaagaactgttttagtcagttcttttgacttatattttcccagcattctcagatcagtccatgtctcattctgctatgcagctaacaaatctcctacataaaataaacacctacatttaaatgaagtaggttttagaattttttctgaaactgaaaggtgatgctccaaaagttcaattattagtaagacaggtatttgtaagccacatggttctcagttcccattgagaagacagatgccctatattgcttataattcaacagctgctcaaggataatttccacccaaagtatgaatttgcttttcaagattccatcatcatcatctagaattagtcttcctctccttttcatcatttttttgttttgtttttagcgacagggtttctctgtggctttggaaggcttgtcctggaactagctcttgtagaccgggcttgtcttgaactcacagagatctgcctgcctctgcctccccagtgttgggattaaaggtggacgccaccaatgcccggcttcttatcaattctcttctcgttttgattttccttgccggacgttggtggcgcacgcctttaatcccagcactcaggaggcagaggcaagcggatctctgagttcgaggccagcctggtctccagagtgagtgccaggataggctccaaagctacacagagaaaccctgtctcgagaaacctaaataaataaatagataaataaataaataaatttcattttcctctagctcttagagtctggccccttacccccgatgacatccctaagccttaagtgcaggaatggtattgcagatatttcagctagaattaggcaccacatgaccacctgttctctactgagattatgtctagaaacttcagaagctacacccattaagtcccatcagtgtggctgcctaaacaagacctggaaaaacatgacaccaatagacatgctaacagagaatgggaaaccttaccaggccccagcacgtgacaaagatcaggacacaaaggaacactgacaggagagaaaaggacagcaggagaaatagtcttccccagagaaaagcccctcattcattatccaataccaagtgatcagacctgaaatcatatacatacaagtgatattaaatagactgaacaggttatatttatgcattttgaagtgtgtgtgtgtgtgtgtgtgtaaaactataaagaaaaagaggccatgaatttggagggaggagtacagtgaggggttggaaagagaaaaaaatggaaaatattatgtaattatattttaatttcaaaaaataaagatactggctaggtattggtgcccacacttctaattccagcacttgggaggcaaacagatggatctctgtgagtttgagacaagcttggtctacagagagtgttccaagacggccagggttactcaaagaaatcctattctgaaaataggttaaaattaaattatttacaaggggaaatgcgcattttctcacttcaataacaaataatcctccaagccaattttctaataatactgccagttacattctcataatatatactatttactatcctaatagcattgaaattcaaagcaagggattcacactacataaattatgtttatggggtcaggtatggtggtccacacctttgatctcagcactcaggaggcagaggcaggtggatctctgtgagctccaggacaatctgtctacagactaagttataggagtcaggcctgggttatatcgtgaggccctacctcaataagtaaataaaataattgaaaaataaaatgtttatgggatcagggctttggcctttctttttggtctgtggtaggctccttatctggggtgaggagacctatgtttttctccccaggaaaacttttgtcacaccacacataaatataaaaacaaataaatagggcagtggtggctcacgcctttaatcccagcactctggaggcagaggcaggcagatctctgtgagttggagaccagcccggtctacaagagctacttccaggacagcctccaaagccacaaagaaaccctgtctcgaaaaaccaaaaccaaacaaacaaaaagcaaacaagtaaatctttttaaaaagataccaatataaacccggtgtggggctggagagatggcccaggttaagagcactgactgctcttccagaggtcctgagttcaattcccagcaaccacatggtggctcacaactatctatgagatctggtgccctcttctggtgtgcagatatacatggaagcagaatgctgtatacataataagtaaataaaattaaataaataaataaataaataaacgtggtgtggtgtctctctgatgacattttattgcatatcttagaaatcacagcataagattcttgctctatgctttggggataaggggactcaggagcactcagggtgcctacattggtcttgaagtcaagattctcctgcctcagccttcagaatatctggtattacaggcatgtacctacctttaccttactggaatgcttcctcttcacttaaaggaagccagtacaactgctctctgtaatttgcattcttacatttgggggccatttacctgaacagagactattacagcatgagtggtctgataatagataataagcaactaagaaatgactagtgacacacactacagtctggtggtgcacgcctttaatcccagcactcaggaggcagaggcaagcggatctctgagttcgaggccagcctggtctccagagctagtgccaggataggctccaaagctacacagagaaaccctgtctcaaaaaaccaaaaaaaaaaaaaaaaaaaaaaaaagaaagaaagaaagaaaagactagtgaatacaacttagatacaggacctgaaatgattcaggtcccaggaaagctggggtagattccatcttgctactcagaaaagcacacaatctgaaactcatgaattgtttaattctgtactttgccaattagtatctttatcccaaggttgaaagaaaaaaaaaaaatccaaactacaaataatggggagtactgtactctcggttctaagagtcccatgcttgctactcattcattcattcgggttcttgagttctaaataagggaggtgagtaacagattatctcggtttactggtgatctagttaagaaaagaaaaaggcgccgggcgttggtggtgcacgcctttaatcccagcactcaggaggcagaggcaggcgatctctgagtttaagactagcctggtctccagagcgagtgccaggacagcctccgaagctacagagaaaccctgtcttgaaaacaaacaaacaaaaaagaaaaaagaaaagaaaagaaaaaggcaagttcaatcccaaagacttaaagctaactccataaatcagctctttgagagaggacccagggttcaattcctagcacccacatggtagctctcaacagtctaactcgaggatccaacatcctcacacaggcatacattcaggcaaaacaccaatgtatacaaaattaaaaataaaaaataaaaaacaaaacaaaaacccaactctagcaccaatgctatatagtaaaatcttcagactggatgttctcttgttttttttcttttctaggcagggtctctctacatagttctggaacttgctgcatataccaggctagcttccaaattcagagatgctgagactggttccttgttgcttgtttataatctaggtatttcctaaacatgtttaaagtaatttttatacagcaaaagcaatacagtagcaaatctactgacaacacagcttagtcatttgatgttaaaagcctctagtgccaggtgtggtcacctacacatataaatcctaggactcagaaaattgagaccggaagaggagtggtgtgagttcaaggccagtctgggctacacaatgagctcaagataagacgtggcaagagactagacctggtctcaaatgaacaaacccaggatggtggtacatgtttgtgttggcattaacaaggcagaggctacctaagactgaaagttcaaggtcattctcagttacctactgagtttgagaccagactgcagttacacaagagtccatctttagaagagaaagaaataacaaaaaaatccttgttccttggtaatacttagaaccctgaaatggtcttagaaagacaagaattttacagctgtgatatacagactaaaaatatgattgacacatacaaagatgttacttaaagtctttcctgcagttttggggagtgggtggtggacgagtgtccttttccaataaaacaagcagtaagagatagtagtcaagctattctttcaacatatttcattttctcctccactctcttcatgcaacaaaacctccagatctcataaaatacatatgtctaactcatgaccactgccaagaatcttggcattacaataggaaatccagcccttgggtggtggtgataaaagttaatcagccctaaaacaaaacaaaacacacaatagtctaaatgaagctgccttcacactgtactgtgatcaaacttcaacttttgtgaacccttgactcttccaaaacagatgtggaagaaaaacaaaccaaaaaggtttaaaattctttatctgcactggtgtagatttgagatgaaaagatccctgattcactttagaaaaagaaagtatttccaacacaaatcttctttgtttgagacagggcatctatgagttaactgtggagcctctcttggaactcattctgtagaacaggctggcctcaaattcacagagatctccttgcctcttcctctcgagtgctgggattaaaggctgcgccaccaccgccccgcagaaaaaagagaagcatttccttgtcacattcttaataatctgttggtaaggctcaccaccacatcttggagaaaatgtatccctttcatagcaaaagtgaatcacacaggggatagttacagcaccagtggacattatagcagaaggggaaggaatcagaatgtactctgataaggtatgctaacagaccaagaggacaaaatcaatgaaaaaaaaaatattgttggcttcgaggtggtggtgcacccctctaatcccagcacttgggaggcagaggcagacgaatatctcagagttgaaggtcagcctggtctacaaagagagttccaggacagccaggacaccaggactgttattcagtgaaaccctgcctcaaaaaaaaattaaaaacaaacaagcaaacaaataaatattgatgcttagtttaagaatgcatttagagccagcctggtctacagagcaagacccaggacaaccagggctacacagagaaaccttgctcggggtagaaatgcatttagaaatacacatatacaaacgtttcctattcctatgttcagaaatcaggtttgagaggcatcctacatgaacaattacaaagcaaacctctgatatgaacaattaaaactgaaattgagaggactggagatggctccgtaattaaagtgcttactgcttttgcagagtacatgagttcagttcctggaaaccacataatgtagcacaaaaaataaaaaaaaaaaaaaaaaacagaaacagatattggggttcaagcttcaaactgaagacaagagaagcaaagcagccaaacccgtagatcttacctctggccagctgaaatagcaatggtgtctccaagaatcctcagaggcaaaagctctcagttcctgtctcctcctgccttttattctttctcaacccacccattatcactcctgtctccacctctctagtgatgggattatagtcatgtgattccaggtgctgagatcatctttgtgtgagctgtttcttttagaactggatcaatttcctgtagtcggtgtggccttgaactaacagaaccatccacctctttactcaggagtgctgggattaaaggtgtgtgcaactactgcccggctagctcgtatggctttgtgactggctttgctttctgaatcctcagacaagctttaataaatcataatatatcaccacacatgacagtttacaacaggctataactccagctccaaggaatctggtgccttctattctagcctccacaggcactgccctcacaagcataaattcccacatagacacaaatacataatcttagaaataaatctgagggactgaggctgtggctcagtaacagaggtttagtatacctgagacctagacccagacctagacccagcgtttgttcattttttctgagacagaatctcactatgtagctctggctgtcctggaactcactctgtagactaggctggcctcaaactcagagatcctcctgcctctgcttccaagtgctgggattaaaggtgtttggtaccaccaccagcctaggtccccagttctttaaaaaacagcaaaagacaaacaaacaaacaaaaagcaagaccaaacaaaacaaaacaactgggtcaggcgttggtggcacacgcctttaatcccagcactcgggaggcagaggcaagtagatctctgtgagtttgagaccagcctggtctacaagagctacttccaggacagcctccaaagccagagaaacccggaggggggggggcacgactgaccacaactggaaaaaactagaacgatgagtgctaaaacaaaacaaatacatgaaaatattacctcggtgctgtgcctcatatctgtacaccaagcacttgggaagctagagaaggcttagtttgcaagatgagccttatctacataacaaatttcaggccagcccaggataaggtgaattcctgtctcaaaaaccaaataaatgggctagagaatggttcagtgaataagagtgagcactggctgttctttgcagaggatccaggtttcattcacaacacccacatggcagctcacaaccatcatctatacctccagttctggggtatctgacaccctcttctcatctccttcattttaaaagctgtactttgttcttagatcatatatatatatatatatatatatatatatatatatatatatacacacacacacacacacacacacacacatcagcattaactttttccccctttgggttctctgtgtaacagccctagctgtcctggaactcggagatccgcctgcctctgcattaacattttcttttaattcataatgaacattttctagtttgggcactgcgaataaaacttaacacagtcacactaacgtttcttcctgaacgaactgatcagaccaaccttacagagccacttagcttttctattaagtcttatgagtctcaagcacagttctgctctctgcgaccagaagcctataggccttacagagtcacacttaactatgttctgactctttggcttggcccatgttgatgatagcacatgatgctgcttctactaatgaaaaatcctgcgagctagatacaaaaggagacacttttaaccaaaaacttcccactgtgttttgaaaagttggacctctgagactaactggacttagacaccaactaaatggaggctcatgcatcactcctatcgcatgtatgataacttttgggtctgagagaagagactgatttgacaaaagcctaactgcctttaatccttagcactcaagcactcagaaggcagaggcagttggatctctgagttcaaggccagcctgacctacaaagcaagttgcaggataggctccaaagctacagaaaaccctgtctcaaaaaaccaaaaatgtaaaaaaaaaaaaaaaaaaaaaaaggctaaacgattcaggcaaaccaattctcactttttaacaatataagacatgatctgcacaaagacaaaacacaacgtaaatgaataaacaacagagacagcgtgttcactctaggcctaatgcaaatcatttgaagacacacggcaatagttcagggcagctggtcagaacagagtagattaagtaatcgaaccaaagctggaacaaagttataaacaacatccaaacttttggaacggtagtctgcacttgagcatcgggacagagtctgttctgaattgaggaattaaaagccttcgactcccactcacctttcctccttttatcaatgatgtaaggccaggctggctcctgagaaaactgatctggaggttcactgaagaactgagagaagttaaagtttacatggcaaagctgtctccccgtgtgtgaacgcagtcaaaacatttatgaccacacgttacttatttttctggccctcctcctaactatttaaaaccgaaagggcttaattcaattctggctactgaacaaaacccacacacggaacgtagatacaaagaattaacacgagatctaaacgccgggcgagttatctcccagctccaccaacactaggaagtcatttatgaggaaaacctgcatcttcccaaccgtgaaccaaaccacctctctctcgtcccggagctacagaggaagcggggagggctgggggggggaggactcgggggggggggagaacgtgatagcgctagtgccggtttgtttacaggctccaccaacaatcctgggagtcggaaattcaagccaccagatgctctccagctaataaggaccgagtggggccgttctgaggcttcctaaaaagatgtcgggacagggggagaggcgcacacactccgagagaactctaccccagaccgccagtttctgggacctcggccttgcgtactaggtgccgggcctgaggactcgggagggggaggggacacactgcgcggcggcccccaagtgacagggggacgcacacagagccgggtcctagggcagaaacgagggcgtacgagcgggtcgccgggcgggcgacaagtccctgtcaactccgggggtagctctaggggggcagccccggccgggctgacctgggcgaagggcgagcggtcctcccggcgctggctcgggatgaggggggcgggagacctacaccccgggggcctggggaaggggatcgagcccatcctgcgggggagccgtcagggaggagggggaacaggccgagccggaacgagacacggaccgggtaggtcaaggggagggcgtccggctgggacagttacaagcacgggagccggcgaggctcggcggcccgcttcccgtctcgggtcatccttctgccagcggacgctccgactgttccaggcccagccgccccgtccactgccgccaccaacgccgccgccatcttacactggccagcggcagccaccaccaccaccgccgccgccgccgccgccgccgccctcgggtctctgcgcctgcgcctgcgccgccgcgctttccggccgcgtttgcgacgctgcgctggaggagactgagcgagaacggtcgcgcgagcgctcggctcccaaccctccccggcggccgcgcagggggcggggcttaaggccaaccgaagcggcgaggggcgcgtgcgcgttgcggagccgtcccgttgttttcctggtttctgagtggtggcttgtctcctggcattcaaaacacgtgtgatttaggggctcctcggccctgtgacggaaaccgagcccgacttccgagacactggcaggcaaaccgctaggcgccctccagtcctgaggtcccaactcttgccatatttcttttctttctttttcttttcttttttcttcagtttttcgggacaaggtttctttgtgtggccctggctgccctggaactcgctctgtagaccaggctggtctcgaattcagagagacccgcccgcctccgcctctgcctccgcctcccaaaagctggggtgaaaggcgtgcgccaccaccgcccggctcacatttattgtttagaaggaaaacaaaacgaagcctcctttgaggatcgagactgcgttttcttcagtggcttgagaggccttctgtggatggatgttcctgacagcacccacttgtttaaagagccagcaaggactgattgggcatgtggttcagtgttggaatgctttctcggggtctgaaagtttgaccctagcagagggggcggggtgagaaggctcagagacaggattcctttgttgggtttttgtttgttttgttttgagacagggtctatctacatagccataactgtcctaggtagatctcatagagatcatctgcctgcctcccaagtgctggcactaaaggtgtgcgacgcctggcagaatttctttttaagatttattatgtatacagtgttctgtctgcatgtgtccctgcaggccagaagagggcaccagatctcattacacagagggctgtgagccatcatgtggttgatgggaattgaactcaagacctctgaagtgttcttaaccgctgagccatctctccagcccccagaatttaatttttttttaaagttagcatacaaactaacgggtttcaagcggtgcatgcctagcacttcggagacaggatatacacaagttggaagcctacctaaaataatcagtggtaggttctggccttaaatgagttctgagttgcccccccccccaacgaacacacaacatacacacaaaagcaaaatagatttccttgtggtattgtcatacacatgtttcatacttggttcttattggtccccttccccaataaccttctttttccttgttggataccttcatttagttaccattagttttcatgacaaatgtatattccattcctttttgtttgtttctcaagacagggtttctctttgtaataaccctggctgttctggaactggctgtgtagaccaggctggcctcgaactcacaaagagatatgcttgtctcaatctcaaggcatttgccaccaccatacagctctgttccctttttttttttttttttttttttctttttggtttttcgagtcagggtttctctgtgtagctttggagcctatcctggcactctctctggagaccaggctcccctcgaactcacagagatccgccagcctctgcctccaccagcctctgcctctgcctctgggattaaaggcgtgggccaccaacgcccagctgttcccctttcttatctcctcttccattccctcttccttgccttcaggctcctttctccttccctgttaaaataagtatgtgattgatatatatccagagctgggcggtggtttgcgagcctttaatcccaccacttgggaggcagagacaggtgatctatctgagttcgagaccaacctggtatacagatcaagttacaagacaggctccaaagctagacagaggaaccctgtctcagaaaaaaaaaaattaaattcaaatgctgcatatgagaacatgtcatatttgtctttctgagtctggtttattctgcaaatatttcattcttcacagctgaaaggttccactgtgtataccatatcttctttatccattcatctgtttatgaacatctaggtttattccacaatttagctgttgtgaaaatgcagctaaatggctgtaactaggcaggttgatggcttcaggtgacttttgtatattgctttctgctgacctaaagaaaacctacacaggattctagattactcccagctagcaggcttgggcacccttatttgttgttgaagatgtagttttagatctggtctcttgcatcacaggctgccttccaactcacggaatagctgaggatgaccttacactacagatcctcctgtctctacctccagtgctggcatttcaggtgtgcatcaccactcccactttatggagtgctggaggttgggctgcaggcctttggacttgttgagaaagtaccctaccaattaaactacatctttggcctctttttcttttaaccagaagctcagggtgctaggttcagactcctcaacactgaccaatactggataccattccctcgcccccttctctacttcagttctttgtttttgagaaaggtacttaagtagcctagaagagctttaaattcacttctagaaccatctcccgagggctgggcatgcaccaccgttgtcttattttattcgtctttgggaatcaaactgagggcttcgtgcataccaggctagcactctaccatctgagctgtgctcccagccacattctattccaagctgtatcctgcctaactgcttgctgcagcagacatgtgattaatactgttaacttgacaggctcggtaattagctaggagacaagcctctgggcacgcctgtgagggattacctagattaggttaattgaggtgggaagacccaccttaattgtgggtggcaccattccatgggccgggggtttgactgaagtcaaagaacatgagttgagcaccagtattcatcactctctcttgactgtgaacacgtgactagcagcctcatactgcagctcccgtgccttccctatcatgatgaacttcccttccaactaaaagctgaaacaaacccttgcctaagtttccatggtcatacaatttgtccagcaattaggaaagcaactaaaacagcttgtctatttccattagtgccctgatgcaatcaaactgaagacagccagactctcttttaaaatctaagtcaggtcacagtcccctacaaaacattcaatactttcccatcccatactaaaaatcaaaattatcagaactggatagatggctcagcagttaggagcactaactgctcttccagaggattcaggttcaaatcccaacactcaacatggtggctaacaaaatccagttccaggagatgatgccctcttctggctcttttggctttgcacaaaagtggtacactaagtgcaggggtgggtgcacacctttagttcctgcactggagaggcagaggcaggtgaatctctgtgagtttgaggccagtctgctctatagatcgagttccaggccagccagggttacccagagaaactgatgggggacatcctcctgtatatatgtttctcttactggttgatgagtaaaactaaactgattggtcagtagctaagctggctttgagtgcctgagtgcctctgcctcctgagtgccgagattaaaggcgctaccacacctggctctgcttttatttttaaaagaagatgcctcacaggttgagtgtggtggcccatacatgtaatcccagcacttgagacacggaggcaggaggatcagtaggaggaccctgtgtgaaaaacaaggagaaagaaggcagggaggggcttaagtgatcttccagtgtcagcctccaaagcctgagtaccgatgcacactcctgcatccagtctgcattactctttcataacatgtcttactttgacactcaacctataattatgtatttggtttaatttaatgtgtgtgggttttgcctgtatctctgttcatcccgtgtaagtgcagtgcctgtggaagccagaagagggcatcgggtcgccaggaactagagttacagctgatggtgaactgccatgtggctgctcaaactcaaacctgggtcctctggaagagcagacaatttaatcactaggccatctctctacgctccaattatatatttaagtctatattattagaatataagttactgaggacatgaactatccccttttcatctttgtaactttgtaactgtagcacctagaagacagctagtgagcaaagcagttaaagtcctgccatcctgctttgttctttcatcagttactgtatccctattacacaagaggtcttgatcttggcgctacagcagtgaataaaacaaaccaagattcttctgtttacagaactttttaattcgtggttggaagtacagggagaagacagatacacagaaaataataagttatgcagattgttgtgaagttaaaccaggtaaaagcaggttaccagggtgatgtgctcttttatcctgggagtttggagaagtcccctttgctgagatgtgctctgaataaggacctgaaatgagaaactgagtcatacacacctggggaagagtgttccaggccaaaggaacagcaaagaccctgaaggtcgaatgtgcttatgtaggaagccaggtggcacaagagaaggatataaataaataaataaataaataaataaataaataacatagatgtggcatgatttgctttataactgaagttcaccttagttgatttctttaactgccttaagggaggcaaaacagaagctgacagattcgctaggaaggtattgcaaaagacctgtagcactagcattgcagtacaagtggtgagaagtggctgtgctgaggaggcgcttttgaagtggcaaagaggtgaacctgctaatagattgaacacagatgtgagatcagagggaaaaagcaaggatatgttgggttaactaaatagcaatgccttttactgaggtacatgtggggggaacaggagcaggtttggtgagaggaaacattcaactctgtcaaatcagaaagcatggagttttatgctacagaaataaacaatcttacgtcttattggcaaagactgtttgctgattgtagtggttcctattttggttaatgtgtcttgtgcctagttataatgacttaaaattcacagtccaaaaacacaattccttttgcatcaacccaaaaagatgggccacacttgtatctacccagccttatgactttgttggtgtaacaataaccagctgattaaatggatctgttgcagttagtcacctttctttttgtggaagggaagatttattttagcttatgatttcagaggattcagcccatggttgcctggctccatgtgcttgggcagaacattaaagcaggaggcagggtagaggttgttcttggcagacaggaagcagtgaaatgggctaatgtaggaagatgccaagcagatatatagcctcaagggcaggtagtgacctacttcctccaactaggccccaccccctcatcccttttcccacccccgaataatgccatcatattatgaatacagtatatgaaaattccattgattacatcagaatcctcaggacctaactgtttctggaaaaccagggtattcactagcccctaaggtatttttttattaacattttaaaaatgtatttgaccatgttttcccttccccccagctcttcctagatcctccccacctgcctacccaattttataaccctctctccactaaaaaaagaagaaaaaacacaagaaagaaataaaaaagcaagaaacaaaaaaaccccacaaaaaagaaaatctaaatagtctaaagaccaataaaacaaacaaaaaagccaaaacaaagtctacaaaaaacaccactgagttcattttgtgtttggccaactgctgctaggcacgggtctgtcctgaagtgtggctgataagcacagagtcatctagtattttacaattagatactgaatttctactaaggctcaacaggatatcaagagatgctactcaaatggtagatttctttgctgaagacacagcctcatccccaaatcatggatgtttagattctgtatagacgcctccagtaccgtatttgtcaggtcgcatgtcccacccccacgacagggaacctaatacaaaactttgaatccctaagtacagatgtgctctctccaaaactgggaaggaaggcttaccataactggcctttctctttagaggaaagaggcgtgttccaacaggcttcaaatcactatcttctaaaagcttcatcaatgtggcaggtcctgaaactttttctggatgtatatcccatcctgtctcaccaaagaatgtaaaaatagctgcactgctaggccatcatttgactaacatatccttaagacctaattagcatattcttactgaaataaatatgattgatgggggatgtccttctgtatatatgtttctcttattggtggtgaataaaacactgtttggtcaatggaggcaggaaaataggcagggctaggagatgaggagaattctgggaaaggtagacagagaggcatggaaagaagatgccatatagaccacaaaggaataacaggtctgggcattctctaggtaagccaagaccacgtggaaatacatagattaatagaaacgggttaataattaaaacacagctagccaataagaagccctagctatcagccaacagtttataaataaatataaacctttatgtgtttatttggggctgaaacgtcgggatctggtgtttcacatgataattctgcagaataccctaagtccctttggatagactagagtgagaatagacatgttgaaggttaagactgtgaacagcctgtcacctaacccttaggaatacaaactacttcagatactttccgatgggtaccgagagagcatacattcactaaactggggtttgtgaactttagttactaaatattttaggctttgcaagccatactgtctgtcactactctacatggccaaagtagcacaaaagcattaaaagacagtatataaatgactaagaatgtcaataaacctttataaaacccagacaatgagcagggcgttggtggcacacgcctttaatcccagcacttgggaggcagaggtaggcggatctctgtgagttccacaccagcctggtctacaagagctagttccagcatccacagagaaaccctgtcttgaaaaaaccaaaaaatccaggcaatgtgatggctcactatcagtggatagacattggctaataaaggtggaaggagaaaactgactccacaaagttgtcctctgacctccacatgttcatggcttcaccccatcaaaccccatcaaacacacacacgcacacacacacacacacacacacacacacacacacacacacacacactctctctctctctctctctctctctctcttgactgtaatctgctgtgtaatggtcacataacagatgttgtgctagacttttcaataaagaaaacatctgacatagcagtgctttggggactactacttgctttagtttgcaaatagtccactgtaatccaccagccagtttttgcaaaagccagaaatactgagaatctgatgtaccctttaagggtgaactaatctttgacatttccctcacaatatagtactgtttttatcctgacagaggtgtagttctaggaatttctacttggtctttctgccaagtgctgggcgtcttcattggcaggtcagacagtgagacacacatttggatattgaggaaatggtcagaagatggatccactgtaaggcagatttggtctagcattccacttgttacacatcccatatttccctaaatggggaatgtttgaataagagacactgcttcggtgttttcaatctatggacatcaatgtcaacatagacctgtaatcggaatgtgtgttatacctgtgtgtaagtggaccacatacatgcaatgcccgcagaagccagaaaaggcatcagatgccctggaatcggcgttacatacagttgtgagccaccatgtggtttgctaggacccaattcagttctgcaagagcagcaagtactcttaaccactgagctacttctccatcagagtgatggtttatattgatgttaatttattgtatctggaatgggccaggagacacactatgggcaggtctgtgagggcatttctgtgaaggacgaattgagaggggaaggccatccctgaagtgggaagcaccttccagctgaaagtattgctcacctgcctgactgccttgatgttttttggtttttttgagacagggtttctttgtgtagcccctgctgtcctagaattagctctgtggatcaggctggggaactcagagttctgcctggccctgtctcttgagtgatgggattaaaggcatgagccaccaccacctgactccgcctttatgcttttttgttgtttttcgagacagggtttctctgtgtagctgtggagcctgtcttggaactcactctgtagatcaggcaagctcctagttcttagcctatcaggttaccagccaatgctgtactatttattccatgtcatgtaaaaccatctactaaactcccttcgtaatttttaatatattcattctgtgggttctgttcctctaaaaaaccccaattaatattgtattccaacttctttggatgtacttccctgagtgtgtggtcattaaatggatctttcagttgatgtttgtaactcacatgctgagctaaatttacaactcttctttgacctctattttgaaggtcttatttatatttcttagctgcctgtctgtcctcctcctaagaccacccgtgttttattagcaatctccacccaagctgattcccttgtagaaaagctgctactctgcttctgtcaagtgctgcttggctttccagaggtcaatgagtttttaagttctacagcaaacactgcatgtccacttcctgaatctttttttttttttttttttttttgcacatttttgtattatctgccatgtctgcttaatgtggtctggaggcaggctcagtggttaagagctatctgctctttcaaagaactagggttcaactccagcatctacatctggtggttcacaactactctggtccaggggatcagacgcacagcacacacatacacagattcataataaaccttaaacttttttcatgtcagatggctactttttttttttctttttaatgtgggccattttctccaagctccctagttctagcctgtggggccttgacagcatattctagggccacaggaaaaggacattatcatacatcttgtatgaatttgaaattcatgtttcatgaagccatctatccagtcacaaatttgttacccaaacacacagaattttggaagggcagctcttataaattttgagaacagcttaaatacttcactaaacttaagctatgcaatggttatttttgttatcaagaaagaagctagaaaaagtgctagatatccatatagtgttttttggttttgttttgttttcctgaaaaccaagtctccacaggtgacacatgggaaaagacttcaagaatgtaagtatacatttgcctaggacctaaggagagactaaggaaagtccagaacactgttattcccataaagctgttgttttaatcactgtatcaacttgtgacattaggtaccagaaatagtgtctaaaaactttggtatttaatattactgtgaaatacaattacatgaccagtgggcttaacctgttagtggagtctagatagttcaggtattttcaaatttgcatggcaagttgtctacagtctcacctcaatatctgttatgggtaacagatccaaatattgatgcaagagggactagatgtttaaagccaaaatctctggtcctttaccacacataatttgaggaggactgccctatgcaccaagttttattctgtcacagaataattcaagtggcatttcatgttcaaacaagataaaaatgaaataagtatcttggaaatagtcatggtggtccatgccagcaccaccagaagtgagaataaaggacagcatggtattgagcacaattaaaagagcaggtcattcttgttcctatctcctcacctagccttgtcaagcttttgtaggaatgtcaataaattattggcagttcaggccccagtcatcatcacaaatcagcttgtacttttttcctttctcagagcatggaggagtctcaaattcagaccccgagtctgagtcttctgtttgatgagctgtggtagcaggacagtccccacagcctgagctcaagtacatttccttccataggatgtgatagaatgtgtgggacctttaagagtgattttaacagtgtgtgtgtgtgtgtgtgtgtgtgtgtgtgtgtgtgtgtgtgtgtgtgtacgcattcgtgcatgcatatgtgctcaaagtgactcaaatgataaatgtggctggcggtggtagtgtgcacctttaatactggctggcactggggaggcacaggcaggcagatctctgtgagttcgaggccagcctggtctatagagcagttccaagacagccaatgctgttatacagagaaaccctgtctcaaaaaaacaaaacaaacaaacaaacaaacaaacaaaaaagataaatgtgaatttgttcttgcaaacgttattttccagggggtgattatgatcaaaatacattgtatacatgtataaaattcccaaagaataaattaatgttatatattttaagttatttttccaagtgaactagacagctaggtggactaaaatgaatatccataaaatatatggcaatcatggtccttagacctactgagaaggtcaatttaaacctaggtaatttagaaaacatgttaacaaaatatcattaacatcaattataatgtcaagctaagctggagggcagggtcatggtagaaactagcataacattacacagaactatctcctaacacttcctactctgcagcttatagaagctcaggaagatcagaaacagacctggatgaaaaataacccacacatgcgctcagagtatttattagatactgtcccctggggcttgcaggaaaaaagactcaggctgcaccccattcccaagcatcttcctgaaccaaggattctagggaatctgatgtctcaagtaagccagaatgtatctgggtagcatggccactcatttaccagctctgacactacaattacgtgttggccagggaagggaagggtctagggaagggaagggaagagaatgacacaggagtagatgaaagggaacaagattggccttcatcagtcacagtggttcagaggggctggagtaaaataagaatctaaaacgagaggaggtaagaggacagtcaaggggccaaggaaggtcaagagctgggttcacccaaaccagagctgttgaaagaaccaaggtaggtagcaacttgagttctcaggaagaaaggggaattaagtgggcagcacctagggacaggaaaagcccagggcttctcttccaacctgaccacaggttaagtgcaaaattcctttcccttcagagagctcgaaatgaaggcaaggagatgtggtgacaaacctacagccccagggtaagctacattttctcctcattcccagaagccctgcctaatagaaacaaacacaaagtcttaggactcagctcctgctccccagatccaagagagggagtagaaacaaggcacgaagtccctgggaataaaggggaacatgagtacagccatatagaccattatttttgggagtgggaagaagtgatgtcttcctttacggggcaatgagctggcctgtttctaacagcagaacacatgatggagtaaggctcacagaaatggcctacagagcagattcagcagatccgcagctggcagggcacagtcttgaatgggatggagagtgtggggcagccagctcccagagacgacattcctgcctcagttcccaatagttctgctgactccagatgttccccaggtctgggactcagggaggaaaacgtgttgtgtttcacatgatcagacactgctcgccattggcacctggtgggcccgatagattgagggtatccaggtcaaagttgaggccaggaggctggagaagagataaagggacggagaaacccactcatatttcaggtcagagcttctgaaggtccatgcctagcagctacaatggtcaccttatatggattaactacggattactggagtctgcaaactgggaactgggttaaaatatagaaagcatgctcaccatctccccggccagctcttttggaggatgccccaagtcctgtaactagaaaataaaaagaacatgcaatcaaaaaagaataaaaatcacagaaaacaacacaaaaagcaacaaaaggaatctgattagtgatctggtttctcctgaccatggtatgtagcctttctgtgttccctccacctaggctgtgtagcaccctttccagacgtctcctccagtcaacacccaagtggacaggaccagtaggaaagcaccgtaaggaggtctttacctgctgcatgagatctagcaccgcctcaaaacgagccctgtgagtagcctcgctgtctgtgggcgtctctgcctcaaactgctcacatattttgcccatgacgctgtgctgctcctggtacttctcaaactgttctggagggatagactcctggtgactctgcagccactctggatactaagggaagagagggaacgggtgggaaagaattcagtgaacaaggagagaaggggacttaaaaagtaaagagaagagaacaaagaggaaagaaaggctaaacaggcgagttcatcgtgaaaaggactaagtactgttgacaccaacaaatcctctgggcacactggtatttactgcagattagtaaactatgtctgcgaaaagcaagaaaataatcattttagactctgatgattgtactagttttattcctgttgctgcaacaaaacatcaaaaacaacttagggaggaacagatttatttcatctgatacttccaggtaacagtccatcacagagggcaggaactcaagcagagaccacggaggaatactgcctactcgctgactgttttgcttgttttttttttttttttagctttcttgctatagcctaagcccacctgcctagagatggtaccacccacagtgggctatgcccttccacatacacacaaacacacacacactcccctaattaaaaaatagaaataaaaataaatctttttaaaacaatataaaaactgctcttagcttgagagttggacttaggctatacaaacactggtctgcagactcctggtattgctactcatttcctactcagtcacatgttgccctgtgatgctgaagggcttctatttctctagtgaaactataagctttttcaagcagggaccatcatttaaactattctcaaattgttcataacaacaccacaaaatcctgtgaatccttactggagaaattaacaaagttaagaaatacaagaagggtccaggcctttaattcccagcactttggaggcagaggcaggtggatctcactgagtttgagcccagcctggtgtacatacaagacagccaggacagagaaaccctgtcttgaggagaaaaaaaggaaggaaggaaagaaagaaagaaagaaagaaagaaagaaagaaagaaagacaagaagaaggaatggatcagtcaaactcagagtcttgaactaatttagagaaaactaaagtgaagaaattaccccttctagctcagacactcccagtggggaaaaatgatcagatcacctatgtacctttattccctcaataacttcttctacttccgacaaagaggagtttaaaagaatgcacttgtacactcaaattgcccttttactatgcattgtctgagcagagtggcccacggttgacataatgaagtgaggagaaaaggcagaagtggaaactcacacaccttttccgtgatctccttcagggacgggtacagtacatccttagacaggaggttctgcatgatgctctgcatgatggggaggatgttcccatccccgtccccgtcatccatgcccagcccttccatggctttggtcagttcctcttcagacatgcctgagttctagacaagacaaaagagaggccaacaggttacactgccttcctggaatgcttaccactcttttaggttcaaagaactatctagatgtgcctgtaacaaaaatcaaggcagggtcagatttgaggagataccctagagcatctactttgtgagactgctcaggaagcatctgggagtggacccctattccttccctttacctgaaggtcagtggcatttttggctagcccacttaatgtctcctttaggcaagaagtaaattcttgttgagagtttgcatcactgcctaggagaaatgaaaagaaccaggattacctaggagtttaattgtcagcttgtctagactgacctacttaccagcttggatataaagcatttactagcaaactactaatacatcaaaatcttacctattctttttggtcaccttcatggtcatgccataaatctatatagattatgtgctaattgttctgcacagtaacactcacaacactgtcttttcaaagggctagtttgggataatcttatttatttatttatttactttgggggggggaggggggttgagacagggtttctctgtgtagctttggtgcctgacctggaactagctcttgtagaccaggctgatctcaaactcagagatccacctgcctctgtctcctgagtactgggattaaaggtgtgtgccaccaatgccccgctatttacttttaagacaaggtcttactatgtaggtctagctgtcctggaactcaatatgtagatcatagtgagttcctcaaactcacagagatccatttgcctctgcctcccatagattaaaggaacatgctactacacctggttgaaataatcttttttttttaattattttccaaaatatcttaaccttttcttacagtaagcaagatctgattcccacacttgtttttcttgccttgctccactccatggctgtaacattataatcaatgttatcaatgttacaatcctggtattctagagcaataaagaggtctgtccagtatattttgtttggggtttcctcacccactctcccagctgcctctgagagcttctggaactgttccaccaggtggggctcttcttcagccagctccttcattgccttctcaaactctgcagtggcttgggaagccaactcactatcgaacagttcctggaaaaacttctcttgggaggcgaagagggcatcctgcagtggagaggtggacaaaattcatctcttacagcaccaccctgagtctagccctctatgggagctcaggtagtgggcttggaaaatgaaacatcagccccacagacacctccactgaacattctatctgcctcttcttctcgggagggcagcaagcaaagaatctggacactgaaggaatagtgtgaggtagcatacaaatccaatcactaaaaactgctcttttctcaaagtgcttctttgctacccctcagtacaaccccaggtccttgtttcacaggagctgaggcctggaagaacacccagcagttccaggcaaaggcatcctcccacccacccttctggcccataggggcctgccccacccctgctctgatttgcatgcccatcccccctcccttaagggggtgggatttatactttggcagtgtctcctggcgatttcttctggggtcctgaagcatcgggggccgaggtggtaggagggggtgctggggagggtttggctttatcgaaatcatcaagagcacctttggaaacaagagacatggtgggtatgttggggatagataaggctagcaagctgcaattctgagcaaactgtcaggaacataatcatatagagtgccagcttccttgaactcccctcttttcctggtgtctcccctgcctggtccactgaccaacaaacaggtttcccacattccttgggaatcatctaacttattatgaatagctggcaagaaagaaaaccctttacataaagccagtgttcatcttagaactagggagaaaggatgaaataagctgcgcagagagaaatctctatatgcatgctataaaattccctaaaaccacacacagttatctaacatgaagagagggagagatacttatttctttgaacccactctgaggcattaacggcaatatcctcttgtaagaaagcacagggtatcccacccaactctccatgggccctactactcgtacaaactccacccgtcctacaggagggtagtaagctctgaagttatgttcaattcagcaggcacctacagctactccccttggccttataagcagtaaccctgggccaatggagtcacttgccacgcctcattaaatctgttcattctctccctgcctaggtcgttgtgactgagcaacagataaaaggttcacctctgccctgaaaagcctgtgttgtcaccaccactctgcttgccaggactagtgaaagggcaccggcctcactctgggcaggaaaccagggtggagggcaagagtaacaaacatccaccatcacttcaggaagatgaaatgtttccccctgggattggctcactgtcagtttctccaaaaggatgaaaaaggatgtcaggcatgctggcatggagaggcaggggccgggaaaatcacaagttcaaggccatctctgagtctgaggccagcctagacgacacgagacagtctctcaaaccaacaataattttcgaagtagtctccttgaactacttacacaaaagaaccaagggcctggtaaagaatgaggaaagactgtgaggtaaaaggagttaggaaagacacttttgggttaagaaagagactacgacggacataaggacccttggagttactctgttctgtgaaggttgctactgacaggggaggagatttcaataattcactaaagccggtcctggcggttgcagcctgtaatctcagcactcccataggctgaggcacgaagacggtcgcgagttcaaagccagcctcaaaaacaatccgacactctaaagcaagaccagttttggcgggggtgggggtgtccgcagagagatttgaggtctggactgatcagtgaccaaggcgaacacacagctcccgctgaggcggagggccggccggggtcgaagtcagaccacctcccccgccaaccactggagagattcccccgctccgccccaaatctcaagttcccttaaccccgcagagggtcctcgcccccgacccctctggccttcccgccacgggctcttactttccagaagctcctccagttcccggtccgcttcgaccccagcatcgcaaccttcctcagcggccgccatcttgctgcctccgacttgccgtaggaggtggaaccactggcgccaccacacgtcccgcccctaaccccgcccctgtgactttgtgcagccaatgatatcgctctactgtgcaggaccgccatttttaaagggacaggaaaccgtggctttcgttggttgttgttgtttttatttttcttctgagaagcaacctcggtcctcgcacgaactaagccagcactccacccccggagctacagccacggcggttggacttgaactagatctgttgcgcaggctggtctagaaatcgggcgcctcccgcctccatttcccaaatgcccgacccaccaggcccagcttgaggtgggggccgggctgaggggctgaagaggcgagaggatctgtttgttaactttccctttcgtccggagaggttttgttttcaggcaggttcttcttgtcctactgcctcctcctccagaaggaagagattacaccacaagatttagctaaacccggagctaaaaaactcccggtaacgtgcatttttttttttaaggctaaaaacagaattgtcaaattgaggcaatttcaaagcctgcatggtaggggagattttttgtttgtttgttttcaagacagggtttctctgtgtagccctggctgtcctgggactcgctctgtagaccaggctggcctcgaactcacagagattcacctgcctctgctgtgctgggattaaaggtgtgtgccacccccccacccttaggagagacttctacccatgccctggactctgacctccacatgtgctccttgacacaaaacagatagataaacaaaataatgattgccaaatctatttttagcacgtagtgagcatctacagttgtatacaatcttatgctaggcacaatgaaatatacaaataaatccgagttggtcctgcctgtaagggctgactggaggtagaattggaaacacagttaatagaattcagacagactcaaacacaaacataattctttctctgcattatttccttctctgttgtgtgtgcatttgttttgttttaccgagacagggtttctccgtgtagccctagctgtcctggaactcactctgtagaaccaggctgtcttcaaactcagaaatcaccctgcatgtgccttcagagtgctggaactaaagacgtgtgctaccacgcccgctctgctttctattcctccttctgatagtcctaacatcctaccgcaatgtaactcacccctcactgctctttctgacttcctaatacatagtgaatactgacaaaaccgtatttcatagtaccccctctcctttcttgcttgaagaggctcatttagctcaggctgacctagatcctcatcctgttgcctacacaccccaagtaccagtattacagatactcactgccatgccctattctgctcatatattttttttaagattttatttattatgtatacaacattctgcttctatgtacatctgcacaccaggagagggcaccagatctcataacggatggttgtgagccaccatgtggttgctgggaattgaactcaggacctctggaagagcagtcagtgctcttaacctctgaggcatctctccagcccctctgctcatatttttttcatactgtttaaggacttaatggctctccactgcttatgattaacttcagacttttgactgatagaattatttcatatatatccattcttctttcccaagttaggtaagtgacaagaagcagagattatcaactgggttcacaatacttactttagaatgtttgtgtacagttttgtgatttaatttgtaaacttacaaaaaaaaagacccttatttttagacagggtctcactatgtagcactggctggcctagaacttaaaagatcatcctgccaagacttaaaaaatatttttaattatttaaaattgtgtgtgcgcacatacgcatttgggtgtgtgtttgtgagtgcacttcctgttaggagcaagaggtgacaaatccctctggagctaagagttataggtggttatgagccaccaggtgtggatgatgggaactgaactctagtcctctgctaagccatttctgtaacccccaagatgtcgttcttgagacggtctcactctttagccaaggctagccttgaatgtgagacaattgttccgcctcagccttccaagaattttaattataggtgtaagccaccatgcctgattcttgcctgtacttgcaggaaggatgtttaaaacttgagaaaatatttttatagtatacaggtttttgagaaagcagccttagtttgaggattatatttaagacagcaactcttagatctgacaacataaaagtcctgtgatctttgaagcaggtattccttttgtagttcagcctcagggatactttccccacccatacaatgtgtgttcaagtttatttattgcaacaacgctgataattgcaaaagactgcataacccagatactatagacactttcataacttaaaatatgcagtgaaaaaactagtatgtatactagttttaaagcaaaatgttcaagacctgtctcagaaataacacaaagaacctggtacacactttgcacatcttttccccagtggatatagatagctcagtagtagaatgcttgcctgtcatgtgcaaaaccctgggttcaattccagtcactaaacaaaatttctgcatctatctagtttttgagaacggtgtgtgctaccctatgtagtgctaggaactaagtccaggaccctgtacatactaagccagcactctacaatggagctacatctccagctgtgtgcttgtgtggatctacacgtggggttgtgcatgggagcgcaggtgcctgtgaaggctcaaaaccctggctctcctggagctggagttactggtgatagaaactgaacctgggccccctggaagaactatgcttgctcttaactgccgagccacatgttagcctattttgttgtttttgagatagggtagtccaggcaggccctgaaatacccggagttatcctgaacttaaaaaaaaaaaaaatgattattttgtggttgaacgttttgatgggtgtatagatttgtgcaccatgtgctgtgcctgtggttaccagaagggtgagttagaacacctggaactgaagttatagatggttggaattgaacctgtgtactctgaagagcagccaatgctcttaactgctgagccatctctccagtctctggtcttcaactattttttttttttttttttttttttttttttttttttttgagacaggatttcactgtgtagaccttggctgatctggaactcactatgtagactgagccaagttggtattgaattcacagatttgcctctgcctctgaactgttgggattaaagacctgagctggtcttaaacttttgatcctgttttaaccttctaagtgctatagaacagatggagccaccagactgggtctgaatgcttatattttaaatcaaaggagtaatatatcatctatccattactcagtatagaagcaaaatgcccttctgacaattgtgatagttctatgaatatgacataatttagaatcacctggtagaaggacctcagagaatgtctgtttagaattatgtgcccaccgtgggcagcagcatttgctgggcctgaggtcctgaatttaaaggagaaagctgcctgcctctgccttcagagtgctggtactgaaaagaggtagacttcttgccaggcagtggtggtgcactcctttggtcccagtactggggaggcagaagcaggcagatctctgtgagttccagtacaggcaaggctgccacacaaagaaacactgtctggaaaaaacaaacaacaataacaacaacaaaaccctcctttttcttcccagtcctgtcagttcagggccagccagaccagccaaataagatcctgtctcaaaacaacaacaaaaacaaaaaacaaaaaagaaaactagtcgagtactggcaggaatacttgaattctttgctctttgctcttgactgtggatctaatgtgactagctgcttcaaacccctgccaccttcacttccctgcagtgatggactgactgtaagctggaaatgggagtcaaataaagaaaccctttctccctgtggttgcttttgccagggtatttttgtcacagtactgggaaaagaagctaagacaactgtgtgcttattgtaaatacatgaacagtgatggacactgataggtgctcagcaaatattggctgtaatcagcaacagatagaaagctgtagtaaaaatgcaacagagaactctttttactttttattttattggtgttttgcttgcatgtatgtctgtgtcagagtgtcaaatcccctggaactggagttatagacaggtgtgagctgccaggtgggtgctgagaattgaccctgggttctctggaagagcaaccagtgctcttaaccactgagccatctcccagctccaagagaactcttcttaccattctccaacaatgtagatctatgcagcacatatctcttaagaaaaaaatgtcattttctccttgcagtgatattaattaaaatgtatataataattaaaaattgattctgaacaaagaatctcctctggtgagagagctacatagatgcgaacaggcacatgaaattaactgtccaagaagtaaatggcaagccagggaaataaagtatttactttatttttaatgtgagcaacaaaacacaagaacaatggctataaaggacaaaacaaatcagtgaaaaatggtatacattttgaaaaaaaaaaaaaaaagactcctcagtctgcaagtgtctgggcccacagagggaagaaacctactgatgacgttaaatgcccaaggaaaatacaagatagttatgaatttcgtggcatttattaaattccactgttttctagtggagtggaaacaaaggcagtaggtaagagaggaataaatactgaaagaatctgctacacaaatgtcctgcacaaagttttcatttgttccttggaagacccaagctgaacggcaaaatcaccttcaggagagagaggtctgcaggagcaaggtcaagtctgaaaatcccaatttgccataggagagaaaggacatgaagtttctgggagaaccagatgtcaacaagctgaagtgtgaatgttaggggagggaggggagtggagcgagagactctgaaggacaggatgtgattaatccacgaacttgaaggaaggagacttagcggaactgaagaggactgatcctcagaccaatcacatctttgccaatctctgtcacctgtggaagtgggaatcagagaagttagagatgaacaaggcggagaccccagaaagctcattccctacacgccccaacaagctgtcagatggatgcttggtcctgagaagtgggccagcgggcagaagctccagctctccccagtgtcactgcctcaaggagctggggcagatgcaaggtgagaaaatcaccaccaccatgcttccttctcttgcccctcctctcaatatcctcgagatactcttgaggacaagacttaccgtagtgactctgcagatttgccccttgaactcaggggcatagcaggccccactgagtggacacttctccacgggctttccacggtagatgggccggtaagatgcagcgcaaatgtcgaaggggttgtgcatgtcgtaactgagctggcaggcgtctgtggggttcttctcacaggcagacaggatcttcctagtctgaagggggaagaacattttgtttaggggatagaaagcagcacaagtactctctgatataagatgcaactgtatactgggcatgatggcctaaatctacaatcccagcacttaggagcagaaggatctcaagttccaggccagcctgagttacatactgagacccagtctcaaacaacagaacacaaccactacactacaggaatataggtcccatcctatggataagatggatgtgaaaaattaacaactgctattgctcctgggtgtagcagtgcatcacagcactcaggaggaggcagagacaggagattcaggactttgagggccagtgtgggatacacagtgaaatttttctctcttttcaacatggctccattgctctaaatccacagttctcacaaagtctagggattagattactagggtttggcctcagaaagagttaaaacagatttctattgcctaagaagaatgtttttagatggcatagataatggattatgtatgagaagtacaagaggtcaagctgtgtcacctggagcttaagaacagacgcatcatctgcaggtgcactggagttattctagattgcacagccaaggagcagtaacacgcagcacaaatgccaaattaaaaattaaatctagcctggtgtggtggtacatgtttttaatctcagtactggggagttagaggcagaggcagaggcaggcagatcctctgtgaattggaggccagcctggtctacatagtgaattctaggacagtcaggtctacatagaaaaaaaattgagtcaaacttgggcaaggtattttccttctcagtattgctttctcattactaaaatacagttatagtctgtatagtatagggtctactccatttaaacatctacataaagtattttagcatgtcacttacccaatgccatgtctgaataaattattactttggtttcagggggaaaaaaagaagctccaaggtcaataagtaacacatagcgtgtcattctattggctgtttggggctgaatgctgttatactgttttgtttcagagacaaggaccttgggcttctattccttccatctggcccccctaaagtccctaatggaattcccctgtacctgttgggccacttcaggctttggcccaagttctagcaagcgccgggcaaatgtggcagctgttttgaaattcttgagcttgaagaaaaggttgagggctgtccgcaacaccaggatcatatgcacaggctgcaggtttgagtgtgtgaaataggctgccatctagtggacagaaaggaacacaaggcaggctgatgttcagctgttgtttattaataggcacacaattataaaaaacaaaataatacaaagcaaagatgattggctataagacagagattagttctacctcttaaaatacgagagctgatgatctgaggaataagggtggagaaatggagaggaactccaatagagggctatggggatggtgcctttgcagggctggccctacgcatcttacctcacagatgcgcttctgctgctctaggctctccttaggcagcttcttcctttctatctccatgcacaaacccacaatgtattcacggcagatggtgatgagctgctgggcctgaagaggttgcagaaaacagtcatgacacagacaatactgtggagatgcccaggatgattgggcaagtggcttgactcctacctctgcaatctcctgcttattgtccacaacaagaagaggcacactgagcaaaatggaacggaacttttccacagcttcttcaaacttgccaactgtggtgagctggtagcacagctgtaatcgttggatcaggtcattaagctttaggcccacagctggcacaccattctttagccctgcctccttcctggaaaggaaaaattatgaagaaaataggatagtcagtcattctactgtgaaagtagctgggaacaggatgacaactggtataaaccaaactccaaagtaacaagccatagatcttttcttctggaaaccttagctccagggcaattccgtttcactgtggttaccatctgaagtgtctacttcaacttggaagaggtagcaaggagcaagcagacttaccagtttcgattagggtaactatacatggatggcaagcagggcagtgcttgataggtggtgcggcctcgggcatatgtctgtaggaacagttgcttataggggccaaactggattactcccacctggtcatgaagaagctaccaaacaaaaaagaaacaggatttgttttctttcttttttggtttttcaggttaaggtttctctgtgttgccctggctgttctggaactcaccttgtacaccagactggcctcaactcagagagagccacctatttctgcctctatactgctggaggatttcttttctctctctctttctttctttctttctttctttctttctttctttctttctttctttctttctttctttttttcaagatttatttatttattttgtatacagtgttctatctgcatgtatgtctgcaggccagaagagggcaccagatctcattacagatgtttgtacgccaccatgtggtcctgggaattgaactcaggaccttttagagagtagccagtgttcttaatcactgagccatctctccagctctgaggatttattaaaaattaagtcaaccttgggtaaggtattttacatctctgtattgctttctcattgccaatatacaggtaattataggatctccatttaaacatctatatagagtattttaaaataacacacagcaacaataaagaaacactgatggttgttacagttgttgtcatcctaacacttgcagtgtgtgcaggaacaggtgctggttttcctcatgtaagccagaaagcaggctaccagcactggcaatggctgaagatgcatcttaaaccctcactggccaagtggagagtggaaagaggcctttgtaaagcctcttgtgggcccttgtgggtcagaccactactcccacgtggctgaaaagatgagtccaccattctcctgggactctggaatagacactcaagaggaagggccaaggtttttaaagacttacccgcatggctgtttcaaaagaacctgccaggatgtgatcaactggaagctgagagttattgcaccagatctagtaagaaacagaaaacctaagtcaaatgaaaaatttcctttttctttccaattctcctcctccatatctgttaaaggtagccaacatctccccaccccctccagaaatcaaatattaaccatcccagagcactcatccctgtgtaattgtatttttctgcttacttgagttgggcttgttcccttggttgggggcacaaagaagccatcttcagcaccaccggcaaccccagcaggtatatcctagaggaagaaaaattaaggctttgtttaaacagtctgacaaagcctcaaactccccatgtagcaaggactgaatcttcctgcctctaccactgtgcctggtttatgtattgtggggctctcagcaaaggctttgtacgtgccaggcaagcactgatcaactcagctatgtttgcaggctggaccacctcacgacatttaaaaaagctgtccaggtactgtgttctgatgatttcaaggcacaaccatctagatggccacctctgttcaagaaaagaagtgatggttgcgggaaccaccttaccagggacataaaagacacattttagatgcctacctctgctggagaaagatgatggttataagagggacagataggaagccatgccaccaaaatgaaaatgacataacaaaagctccaaataagattttaaacacccccccttcaagtggaagataagcattagattagagagaggttatgtatccccttctctaatgctacataagaatggaaacaaggctacagtccacagtcagctctcctctttcaaaacctatcagattaggaggctgctctggaccactctttgtggagacttcaggataggcatcctgtaagagatgtgtgtgtgtgtgtgtgtgtgtgtgtgtgagagagagagagagagagagagagacagagagagagagacagagagagacagagagagagagagagagagagagagaggagagagagagaacagagagagagaaagacagagagagagagaaagagaagatagaagagagagagagcagagagagagagagagagagagagagagagagagagagagagaaagcgagcatgcacctgccagtttttatagggtgaaaaggggaggaacttcacataccagctcaggtgggagctccagatcttcttctacatcccagccacctccttcttcttgtcccttgccaagagcatcctctcccaaaccttctgaagcctccacaaacccatctgaaaggaaaatccaggatcaaaatagatttgggtggtagcataaaaaaagcaaaatattaggatctaattggctccatgagttagaagcttattgactgccccatggataacttccatccatggagcctatcatctaagaagagtcctaaaatagcattcctaccttcatctaactgcagttccgcatcctctccccagccttcagtaccaacagtgtcaatgtcaatgtcagcagccaacgctcctcccttccctaccaaaggaaggacagaagggaaatggttagaggctatcaagtccgatctctacaggcaaggggcaagcttccaaaggcagttgctcagggctgtgtcctcaggaatatgtgttttccacttaggaagtgctaactctgaatgtcagtaaacatgttttattgtgttaagtctcaaaacaacaaaaatactccaaacaaaacccaataataattgccgaggttctggtttttgtgtttgttttgtttttcttttaatgtctgtgtatatgagtgtctgcaattctagtgctgagaatctaaactcaggctctcattcttgcatggcaggtactttactgactgaaccagctctgaagtaaaatttggttttttgagacagggtttctccgtggctttggaggctgtcctggaactagctcttgtagaccaggctggtctcgaactcacagagatccacctgcctctgcctcccaagtgctgggattaaaggcgtgcgccaccaacgcccggccctaaccatatattctgagttattgtttttgctgtacatatgttatgctaacttgcaacaggatccacaaagaaaggaaatagaagagataaccagaagttgttttttgggggagtggtgatgatagctaagttcaatggtagagagcttgtctagcaagcatgatgtcctgggttcaatccctgttgaggtgggagagaactaactctctgttactaaaatctggctgtctctggctgcccacccttggaccttcttcctgaaatctttgctaaatcaccattactacagtctgtgcagagaatgaggaggccgaggaaagaacagagccagacacaaaatgcccgaagtctgcttagggcttacataaaggtgaagtagtggaaatgtccaagcaagtaagagggcaaggatggcagtatggagtgggtgcccacagacacaaacacagcacatgaacaggaaaataacgagtggagatcactgtatatacggtgaactagagaaacatatcaacgtgtttacgggtgtcagtgacagcacaggcacccacctacatcattttctcaatttctttgttttggggggatggggtggggggctagagacttgagaaagggtttcatgtgatccaacctgatcttacactggttacataatctgtgatgactggctttgaactcttgttcctcctgcttcaacttcttaatgtcgagattacagagatgtgccacacctggctcaaattttctctcgtgatctcaaaaagcatttcctcagtgtgtgagactacatcctagccctggctagcttttcagtgatctgtgaaacttcacacagaaaaaaagaacaagtaaaacagttactggtactttctaagattgtttttttgtttgtttttaagatgtggtctcatgtagtccggactgtcgtaaaactgactatgtggtcaaggatgaccttgaatttttgattcttttatctccacatccctagctggtggtattacaggtgtgtgtcagtatgtgcataatggtagggatgaacccagagtttcatacacactaggcaagcaatctactatagcgtgctataggagaaatgagcacttacccttgctggcaatggagccctcaaagaaccctttggacacagtcaataagggccaattggtatccagtggcatgataggtgcaggcggctggagaagcttggcattaggatcgatgtccgggatctgagaggtggaataataaagatattaaacatgaatagctcttaagctctcgacagcattatatagaagaaaaggttactctgcttcctctagacatctttaagcctctctctataatttgctggtagagtaaaatttatggcttttttttttttttttttttttttggttttttgagacagggtttctctgtgtagctttgaaaatttatggttttaagtgatcccaagatgagaatgagtcctgttatcagaaacatgtgtgtatatactcactgtctccttctcagggtcaaatgtttcctttagactctcagcttcttcatctaagccatgtgtagcagctgtgagataggccagggattctaaagaaaaaacaagctttgtggtataagtacatttccaagagaatgttattctgagggagggggtgacccctatctcctaatatccaaatgcttccataatacccaaccataagtgtaggctgaagttgttagctagcttctaatggacagaatagtccgaaatgatgaaatgtcacgcccaagattacaattgtagattctattttgggtgtcatctggttaacctgtcctgagggaaaccaggtgccatgctggtacttcgtgatggagaaggtaacatggcaaaatgacactgtctctcaaaggggagcaaagacccaagtaatggccacacccatacaaatgagtatggaaatgcattcttctcctgttgggtctttgtatgtctatagtcctggacaacactctgaatgcagctttagtagacaacactgaaccaaagctaagctatactctaaatgtgaggggatgttttatttatttatctatttattttggttttttgagacagggtttctctgtggctttggaggttgtcctggaactcccttttgtagaccaggctggtctcaaactcacagagatccacctgcctctgcctcccaagtgctgggattaaaggcgtgcaccaccaccgcccagcctttttgtttgtcttgtttattaattattttctatgtttattgtgtacacaagttcatgtgggagtctcacagcgcacatgtggaaacctgttgggaattggttccctcagttgttttaaatacaacttggaaaggggcaacagacaccacaaatgtctgtttaagcatgtccaagaagcatgcttaaaacatggatgaaaaagtacggtttccaaataaaaacaaaaagagaagaaacttgaggagctaaaagcaaaggccaaggggcaagtaagaaatctgatctatccagtgggtttctggacagccagggcttcatagtgaaaccctgtcttaaaaaattctggtatgtatgcactcataaatggatattagacataaagtaaaggattgccaggctacaatccacacagaagctaggtgaaaagggggacccaaattgggatatatttggagggccccaggaagggaaaacagttgagatctcctaggtaatctgggaggggaaggtagaaaggaggagatgggggatgggaacacgagggatcaagaaggccaagttgggggaacagacagacaggatgagagagctatcttggtagagggagctattatggagttagggagaaactagatgtagggaaattcccaggaatccacaaagatgaccccaactaggactccgagcaatagtggagaggatgtctgaactggccttcctctttaatcaaattagtgactactctaattgtcatcatagaacctacatccagtaactgacagaagcagatgtagtgacccacaagctccaggagggaggagggaatcatacgagcaagggcagtggcaccaggacttactctgggtgcatgaactggctttttggagccaatgttccctatggtgggataccttgctcaaccttgatataggggagaagggcttggtcctatctcaacttggtatgccacactttgctgactccccaaggaagtctttacacctactgaggagcaagggggttggggggggggaggagacagaagaaggggagggagagagggaactggggttggtatgtaaaatgaaaaaaagaatttaagtaataaaaagtttcaaaataaaaaatctggtaaaaagaaacttgttttgatgacaatgacccgtgattccattcctatttaaacatctgagtttattgtcacttcttttgccacttactagaagtgttatattagagtctattatacattaagtgtttttaaaaaacaatttttgtaattaaaaaaccattataatttaggtattattctttggaaactagaccgtaaacgtttcagattttagagatttttggattttgtaacatttgtatagaaattacagtaggagtctcctcatgtgaaatgggaaatttggaccctcaagatggctcaatagataagggcctgcagtctaagttcaattctagaagtacaaagtgcaatacacgaaaaggagaaccaactccactaagttgtcctttaacttcacacacacacacacacacacacacacacacacacacacacacacacacacacacacacacacacaccagttactcctccacccaataaataagtaaatgtaataaaaattttgagaaaatataaaatctaaatttagaaatttctttttgggggctggagagaagacggttcagcggttaagagcactggctactcttctagaggacctgtgttcagcacctacatggtagtcacaactgcctgtaaacagttcaggcggtctgacaccttctcacttacatacatgcaggcaaaacacaaaagcacatgaaataaaaataaattaaaaagaaaaaaagagaaatttgttttgtttggcttttcaagacagggtttctctgtgaaactgctctggctgccctggaactcactttgaagaccaggctggcctggaactcacagagatctgcctgcctctgcctcttgagtactgggattaaaggtgtgcaccaccactgcccagctaaattcagaaatttttaagcattgtatacatttaagaagttggattccagctagtgagttccagaccagccaaggttatatattctttggattttgaagcatttcaattttggatttcatttaggaatatttaatttatactaatgtttctttggggggggggttcaagacagggtttctctgtagctttggagcatttcctagaacttgctttgcagaccaggctggcctcaaactcacagagatccgattgtctctgactcccgagtgctgggattaaaggcgtgcaccactaacacccggcccagcctggtaatttcttacaaagcaattaattcattgcttttcatcaatgcaaataacaaccttggacttatccctatatctacatctagtacttaaattataatagagttattatattttatgtgtgatttgtctgcatgaatgtatgtacatcatgagtaagcttggtacccacagaagccagaaggtattggatctcctggaactatagttaagtagagttgtgagtacccctacagggaactgaactcaggtcctctgaaagaacaacaagtgctcttaacaactggcccacttctctagccccttgttttttgagacacagtctcactcttagcccaggatggccttaaactcatcttgcctcagccttctgagtgctatgattagatgggagtcagcattcctagaacttgttccttaatagatctcaaattctagcataatatttggtatacagtgagctgtcagcaaacaacagtaacaataaatcgagtcctgtaaactgcacaagttttttttttttttaagactcatttatttatttatttatttatttattatgtatacagtattcagtctgcaccccagaagagggcaccagatctcattatagatgattgtaagcccccatgtggttgctgggaattgaaaacagggcctctggaagagcagccagtgctcttaacctctaagccatctctccagcccaactgcacaagtttaatgtctacagtggacgttaaggaagtccaggatgccttatctgactccaccaccatttggtttagaagaaaaattttaaacatagtgtcatttttcatacacacacacacacacacacacacacacacacacaaacacacacactgtgtaatacagagcaattcccaaaaatactactgcaaaggtctcaaagcagttgatgagtccttgatagatacttactctgtccacagttcttaaggattcgtactctctctgacacatcacccaggtaaagggcgttctgataatggccactcatgtcctttcggatctcagctgcataaagccaatgagaaaccaacttaagccttctctctagagatctctctcctcttaccttcctccccccaaaaagttccacatttcccaagcttagttttagggaactcaccaatcttcatcatcttgcgaagtttctctaggttgccagtaataaggtacaagaaggaaagcttgtcaaagtttttggttcgctgatagcacatttctacaatctggtgattaccctgtagcagagccacttctcccagcttctcccagcagttcttgtcatccagggctttggctgcttctagagcaatctaaagaattcccaagtcagtgttcagtgtgggcactctgactcaaaactaggggagtccgtttgtctctaaaacttcccaaggaattctctctacttgcaatcactacttccactctgtttctatcaagcattctatgtacaatatgattgggttcatagatgaagactcacaccatagtgttcttgctctctgaaatctactcgtacagtgcaaacacctatcagtgacatactccacagatagtccttagttatgctatcttgtttcctatctgctagtactgaagctccacaggagctacaggaaaggcagaggaaatagtaagagaagaaatgaagtgcataattgcaaaagcagccttcctaagtcctttcctcctagaaacaatgcctgtgccctctggaccccaacattgcctaaggactttatccagcatcaaggaaaataagcagattctttggatttcttactattttgctgctatactaaaaattcttttttctttcttccttttttttttttttttttttttttaaattggtttttgcagacaggattcctctgtgtctcagtactggctatccaggaactctctctgtagaccaggctggcctcaaacatggagctccacctgcccctgcctcccaaatgtggggatcaaaaggtgtttgccaccactgcccagcttagaaattcttaaatgtagtttgaaaatagtaacaagaggccatctcctgggaacccaggagtggacctggacagagttcatcctcctggccagtatttgaagcttacttcaaatttgacacacactcccccatcaaaaaagaaagaaaatagtaaaaggtggaaatattgtggcagaggaagagacagaagaagcagaaacaacaggaaaatggttcaatttacctaaaaatatccgaaattccactctggcccagatgacactttctggagaccagtctcaggcctagcactctattaagcttctccccgtctctccagctatctgggacacgtgaccatattcctctcacctcaatgtttccgcactccagagctaggctgaagcgagttttctcatcctttacaaaatgcagggccacttcaggataacccttcttctggagataagcaatgattgactggcccactagtttggcgttcctcaccatgtgcagtacctagacatttggtttgggagacaggaaatggagattgtttataaggaaaaaggagcttagcctcttaacccatgttgttaggtttccttgcttcatacctcatcatactttctgttgatgagggccaacttgaatttgaactcagtgggatcaatggtgagtactcgaggacgacattccctgtctaggcaatatacattgttgcccttcactcttgtgacatagatgggcaaatccagagttcggatgatcccatggtccctaggaatagggtaaaaggcacaattttcagggagcaagaggaaatccatcttgtaaacaatgaacaaagttaggacagtctttccttgctaccctttcatcgagtgctacttaaacaatggtatggccagacagaagtgtttctaattgattttatttttttctacaacagaacagatgcaatggactttttgtttttacattgtgcagtataagggactgaccctagagccttgggcattctaggaaagcacactactgctgaccagtctcccttaaaaaataacaaatcatagccgggtggtgatggcgcacacctttaatcccagcacttgggaggcagaggcaggtggatctctgtgagttcaaggccagcctggtctacaaagccaaggctgttacacagagaaaccctttctcgaaaaacaaaacaaaacgaggaaatcattctgtatgtgtgtattatgtagtgtagaaatgcacgatgcagtgcatagagcatgtgtggaagtcagtcaacaactctggtagttagttctctccttccacctatgtaaggaagggttctggggtcaaactcagatcaccaggctcacacaccaggctcgcacataaagcactatctcactggtccttcccagtcctttataatgttttcctaagtcttgaaaattttttatgtatatgtgtatttgtatgtgtacacaatgcaggtgtgtgtgtgtgtgtgtgtgtgtgtgtgtgtgtgtgtgtgtgtgtgtgtgtgtgtgtagggggtggtggtaggttaactcttgggagctggttctctccagtcactttgaggaacctagggattgaactaaggttgtcaagcctgtgagaaactgcctgtacccacaagcgcgcacacacaaacacacacggatatctttagcacatatatgtcctgttagctttttcatagagaatgttgagctagcacagtgattttaagaagacaccttcttgcactgtgtcccagataattaacttacccagtggtgacggcatatttgatgtggttgcttgtggtatagataaacaccccactctcatcccaggccccactcttgacacgaatgttctcatggatgttacacagagcatccagcttgcggttacagatcacaatggctgtaagaggcaaagggcatgagtgctctgctggacagggtgagtgcagcaggctggcaggaaggaagtgggctctaagatggtggatataatgaagccttaccatgtttggccagtagtgctacatgagacatgtctgctgaccagataacatatttcaccttggaaatcttcactgatgccagagtcctgggatagcaagagaaacgtaatcatgaatgggcttaatttccttgtctcaagctatgacctatgtcttttccatctttaacgtaaaactcaacttctcaatgtaacaacaaggaaacatgacctaccctgtaggtcagtgagctaaaatgttttgactcacagtctgcactgcctccttcctcgttctttgctctctactcccttctgtgggcacacacaccacatctatccgtttcacaaactgtgtccttctcatcctaagacccgaaagcattctttgttcagatatgtactacaaaaataatacctagccttttgctatactgctggagagcaggcacaggttggtagaacagccatggaagggaaagagaactacaaacagtcttggagttatgtgtgcaagcagcagctcggccacatggcaagattttatatatatatatatatatcagccctgctaaagatttctactctccctcactacgtctgtctgtcaggggcacctgtcatgttaccgcttttgttggacatcaaagagtgtgatggaatctgcatcccgaagcaggaggttgccagtgccagcgtagaagatttcatcacagttgggcacctggattttcttggtgatctcattcttcaggttctttatcagaagctaaaatgagtacaggtggaattacaagaagtgaataaataagctaacagctaatgatgtccttcagcaattattccttcaatagagtttatcccccccacccccgttcaagtcatttatacatcaggttgaccactccaggacctggttattaacctttgccttttctttcttcttcccaactctctcaacttttgtttatttatttagcgcccccccccccccgcgcctcacgtgcgtgagtgtatgcgtgcacgctcgtgtatgtgtgtgtatgtgtgtgtgggcacatacattatggtgtccatgtgtgggggtcagaggtcaaactgaagaagtcagttctctcctacacatgggtcccaaggattgaatttagatcatctaccttggtaagggtccttacccactgagacatctcaatggtctctaacctctcttaaaagaaatcctgagaggctgggcctcgtggtacaggcctgtaatctcagccacttggaaggctgagacaggactataaattcaagccctgttggaactaaagagtgagttcactcccagtctacacagatccttactagtcttagtcttaaaattacacaccaaacaaacaaaaaacttaaaatggaagctggggatatagtttagtggcagagcacttagttcagaagctctgaaccctggtaacatcaacccaaccaaatcaacttttcctccccaagagattaggctagggccagggcttgagggagtcccagtacccaaggatcacaactgctctggagagacttagtaaaaacagtgctcttgattgggaactgctaccatactccctaagctggtctccacttttagccttaactcaccgaatgcatgcgatctaggacagcaaaccgattccgagcaacccaaactgctgtcaggcctgaggatcgtttcccttcaggggctgaggagaacaaaaccaaagtgtgggagcatgtggtgagccactagcaggtgacagagtcaggtgccatggagctgccattttggcttcaccagttcagctgcttcctaactaattcagccataacctcaggctactgtcagtgacttttccccacccgttccctccaaactctagcccccacctctgccaagcctcttatctctaggccaagtggctgcatttcagccagcaccacatactggcagaagtactgcccatcttgggagacagcatactccatcaagctaacgagcagggccttcctggccaagctgaggcacagcaagcagcctgtcaaagtctaagacctcctatctacacaagctggagaagtgacagaaccccgccccaggacgcagctgctctgctgcttttaacatgctaatgctggccccctagtcaggcagggtgggactcagcacttccagctaaatcttgacaggctgggtgctgggcaacacagcatcaagctgttgctctgtgaatgtcaattcagcattatcgccctgaggagagttataaaacgttcctcagtttgtagctgattagaattttgaaatggatactcgactctctgagaaacttgtaaagaatatattcaaacagttttatctgttataccaatggaaaacagcacagaacatgctggccagccttattttgtacttttctgataactggaatgccaaagaacttacaaaataaatttgtaccacaacccatactactccagtttctgctttctcctctctggtgtccactactggatcacacctttataattattatcccatttaaaggatggagaacagacattctactgattgttaacggataagaaaaagaccaaaatccaaggtgggatgggaggcaccaaatcacaagttaacaaggaaggcttaactgactaatttgtgagggagactttactttatggatcccaaatatatataggtttcttgtttctcttatcctctcaccctgagcataattataagagtaaattgagttggcataatgtataattccaatactaaggggaacaatgagtgctaggctaatctgggctatacagtgagaccctggccatatacatattccctccaaataataaaaaaaaatagagtattacaataataatgacctgttagcactcacaaaagggacggagctagcaaagtatttctcagaactttggaggatgtgaaatatcaaaatgtactaataaaggcagggcctgtggaataaactttatgctgggtaaagcctgtaaatgcactaaagaactgcattgaaaagagcataaatgagattccaaaccattctgagagtgttttgtcagcaagttctaatagtaaggacatcaacaagggatggtggtgatgaaagaggcaggcaggggtctcagctggatcctgggatcccaggtgggtcatggggctgttagcagcctcatctttttgacaagcaaaaggaagcaaatcggatctggacatagataggggagaataaatccccagtcccaggatgagacattgcaagactggagccacatttttaaataaatgaaactaccagggtgaaagtcatatcagctgacaataatctaggataacatgctgtgctgaaagagaaaatggagagtttctaataaccaaattataaaatatatatatctagctggggtaataaaatggaggcagagcatgaatatttcacaccacaattgcctctggtgcaactgtcagcagcacctgccaacagacatgagtgatgtagccctggcctgcggatgggatgtgaacaacttgaaaagaagtgatgatgtgggtgaggagagctgaagcagagtggaggagacaaagagcacctaccatcaggattctgggagtctgcatctttggggatagtgtatagatcataggtactattctctaaattgcttgctctctgtagagaaaaaaggaaaacatgtttagtgagcagcaccgaacttttttttctgaccaaaaaaatgtactgcaacacagacaacactgaaagtatagttccattacctgcacccaaaggttatttgagttatttccatatgtaagatttataatgctctttgccaaacaactaggcatgataccactattttctttaccctctaaaaacacagatattatctgaataaaaacaaagatttctctatgttccagaaaattaaaagatgaggaacctggtacctcatctgaatacacttgtcaacttaaaagtctactagaaaaaagaaaaggaagctgggtggtggtggtgcatgcctttaatctcagcacttgggaggcataggcaggcagatctcagtgagttcgaggccagcctggtctacaaagtatgccaggactgttagagaaacctgtctcaaaaaaacaaaaaaacaaaaaaacaaaaaacacccccccaaaaaaagaaagaaaaaaaaaaaagggaaaagaaaagcaaaggaatacaaaatagatctaatggcctatgaaaatggcctatgagaagttacatagggaaagcagtttgtgcttagcccccagggtactaaagttagaatgacatttcttcattttttgaaaattttgtggcagtaaacaggtagggacctgataacttggaaggtgacgtcactgaaaagaagcagctttccaacacaggtcttgtatgttcatctgagcagaggggacagaaaaggcacctttgtgcacaacaaacaattccaaacatttcttttgactactttacaaacccttagtaagtttatgacaactgaaaccatttagtgtgagcctctgagtgtcaactgtgtgttagctctcacaaaatgtcagtcaaggggacaatttgactagcatgtgcctatatttttaattttcagtactcgggcaaaaaaagcttttaacagtccattagaggtcggatggtggtggtggtggtggtggcgcacacctttaatctcagcactggggaggcagaggcaaggtggatctctgagttagaagccagcctggtctacagagtgagttccaggacagccaaagatacacagagaaactctcttgaaaaaccaaaaaatgccaatagaggttcttttttgtttgtttgtttgtttgtgttgttttgttttgttttcgagacaggtttctttgtgtagctttggagcctatcctggcactcgctctggagaccaggctggctttgaactcacagagatctgcctgcctctgtctcccgagtgctgggattaaaggcgtgcgccaccaatgcctggctgtcaatagaggttctttagggacaataaggtacttacagaagctaaggcgaacctagagagactccatgattacttacagtgcacagtaggactgcattttctgctggattgtatgacatgttgaacactggaaacttggaaccactacataaaaaaagagggaatagaacaggtaaaagaatagaaaagatttatcccctcaacgtctacactcagtatacacatgctcactacttgtatactgaggaaaacagatactgtgttttttctttccattaaaacttcactactttaatggttcaaacggcaaagaatagcacaagacaattttcatcagaaggcggtcagtggtgatagttttgcctgatacaaattcctatacataactgcagtggacaccacagtgtagcatggcgggatttctctgcctgttttcttctgtgcctggactgttcgcataaacccatctttttgtcacagtgaagctagctggcggttatcaagcctgcatgccagtatttgctaccatgaatgtttcagcatgctgcagctggcattcaaagcacagttcctttggccaggcatcccagaggttagcttatcgtcagagccaactgtgccagagacacacttctgctttttagggttgtggtattttgctttaaaggtagagttctgatacactaacaacttaaaatctttattattttcttattatactaaattatagtcatttatgtctatcaccccactctaccacaaggttcctcaaggcataaatgacagaagttacattactaaattgggctactctctagctagctttctgtgatgtacaagagattttgcagtcattagtaagagaatgtccgtggcacagggccactagcagtcccaatagggacctcccattctcctcacttggtacctctgcatctgccatatgtgatttaaactgaggaggtttgttcagtggggatctgtatctaatagctgagacccagaaggttaaagagccctggcttgaggaagtgcaacagatgaaagggtctggaaagtaaaataggtcaggcttgcctcctcaactgcatcacagctacatctttggagctgttgaaatccagctgacggaggaatcggtcctttacataatgcagcatattgccatgaacagcataggctggtcgttcacgttccagcttaaatacaatcattccaccatcatggcctagagaacagagggaagagaggaaaccatcagctgtaggagaaaggattgctagaaataggagatacacagatgaatatattcacatgctaaaaagggtagggttcacatgtagaagcttggtgtgagatgctgctgaggtgataggatctttaagagatgaggcttagtgagatgtcactaggtcattagagaagcaccctgggattcatgttctcaaaggatactggtcagtaaccaggggagaatgctgctatacaaagcttatcctgaattctctctggattcctgccttgtcatgtgatctttccctcttgaacactcctatcatgatgctctgtgtcacactgtgattgggccaaaggaagccccaccaaagacagtttgggctgttcaatcttagatttccaacctccttaatggtgaataaaataaatgccttttctttttcagatctatttgtttttattttatgtctatgtgtgactacctgcattcatattatatgcacattgtgtaggcctggtacctgaggaagccaaaaaagggtgccagatcccctgggactggagtaacaggcagttgtgaacatcatgtgggtactggcaatggaaccttagtcctctgtaagaataacaagtctacagagtgagttccaggacaggcttcaaagcaatacagagaaaccctgcctcaaaaaaccaaaaaaaaaaaaaaaaaaaaaaaaaaagaatagcaagtgctcttcactcatgaggcatctttccagcccaaatcccttcctcaccacttattttttccagttttaaatattttgatttcattttatattccaaacagttttttaagtactcagtataacgtattttgctatagttacagataacagaatataacatctaaatgcattcctaaactctcatagttcttagaacctttttccgtcactcatctccttgccctttcttcttgaatccgggacctcatacaagttaggagaaagcctctactaaggaactaccaccccagccctgtgtgtctccttcgcactgtttcatgccaccatttctaagtgcacctctctgtgcactcccttaacgtttgccattggcatccattagcgttcacgactccactatttcatgtgttctctgaaggcacaatttatattatttttgattcttcctcagtctttagcaaataagaaacccgtaaaaactatctgcttaaaaaaaaaaaaaatgaacattagggggctggagaaagggctcatcggttaagagcactggctgctcttccagatgtcctgagttcaattcccagcagccacatggtggctcacaaccatctgtgcccatcacatcagtatacacgaagacaggtcactcatgtacataaaaataaataagtatttttaaaagaatgaatgttcacttttctctacatttctttatcgggggagagcatatggtgatttgtgtgtggaagttcgaggactacttgggagagtcggttttctcctaccatgtgggctcccggtattgaactcaggtggtcaggcttactggcaaacattttaccagctgagccatttcacctgcacatgaaagttaattgaaaaagcctttatgaagtaactaaataaaaggttttgggttttttggtttttttgttttgttttgttttgttttctgatgcagaggctctctgtgtactattggctattctcgaactcattttgtagaccaggctggccttgaatttggagctcctcctgcctctgcctcctgcgtgctggaattaaaggagtggggtaccactgcccagcctaataaaaaagcttttatgattgtttttaagaaaatgttaccaggcggtagtggcaaatgctcttcttccagcacaacggaagtagagacaggaacattactatgaatttgagaacagtagaggctgcacagagaaaccctgtctggaaaaacaaaaacaaaacaaaacacaaccaaccaaccaaccaaaaaccaaaaaaagtctgtattttcctgattagcaccatctaccccttaaataatctcatttttatactccaactgcctcctctcctcatataaacctgcttcacttccatactcaaaaatcttccaggggcttcttttaagaacttgattgactttttttatttttatttttctgtgtatgagtgtgcctccagaggtcagaaaagggcatatgatcctctggaactagagttatggaaggcagtgagtcagtaactatgtgggtgcttgaagccaaacccagtttttctccaagaacaacaagggcttttaaccactgagccatttttctagctcctttccagtggcttttaattcattcggaataaatgattttttgagacagggtttctctgtatagccctgactgtcctgaactcactctgcagaccaggctggccttgaactcatagagatccaactacctctgtctcccaagtgctgggattagaggtgtgcaccatcactgcccagtcagaataaaatattaagttctagctattgttgtgggatattagtttaagatgtgttacacttgtttatgctgtggaatgtttgtttaatgatgtaaagatgtgttgcattcacttatgttgcatttgtataactttgtgaagctgtgttactttgcctgcctaaaacacctgattggtctaataaagagctgaaccgccaacagccagggagagggctaagcggggttgccaggcagagagaataaacagaaggagaaaaagagaagagggagaactgagaaaaggagaagatactagggtcaactactcaggcacccagccagccactgagtaagaaagatacacagaaatagaggaaggtaaaagcccagaggcaaaagttagatgggataatttaaattaagaaaagatggctagaacagtccacgctaaggctgaacattcctaagaataagtttccgtatatttatttgggagcatggtggcaggcccccaaagagcaaagagtaaaaaaccaactacaagctatagcctatgaaaccaacaaattctgatgtagccttgcttcctacttcttaattaatgccttactatattcccactggtatctctaatactccctcccctcccatgctaagaacttctcttttttacccattccatttctttgcctatgacagccttccttcttattcattttcatcttcctgaacaatcaatataaaccagtagtacacacactgtcactgcctttcttttttcttcatgtttgttcaaagcatttttcaacacacatcactttatatccctactatttacagtctatcgccctcaaagctccatcaagacagggactcttgtatgaactgccttgacaccaacacagagagtaaggtctgatatttattatgtattcgacaaacacatgagttagacttggcttctagtttctcagtctttgaactttaaggttcaatattagccttctatgagctcctaggaacacatccaagagaatgagcttaaggttaaactaatctgggtagagaagaacaccatccccccaaagtagagaggtaaaaatgagaagagtttcaattaggtggctctgagaattctgcttctttttgttatcctattaccaagtactggacacaaagctaatgaaaatctctttcacatcttagaaacgtttaactacatcagagggatgggaggagaaatggccctaacctgctgcaaacaggttgaggttgggatgggcagctaggacccagaaacgatcatgatcccggcggaaagtctggaccccggtcctaggaaacaaaaaggtacacaaagaaaactgttatataagaatctccagtacatcatacataagaaaactggacaggaaacatatataagatgactttaaaagtgcattaggcacagaaaacagtgtaaatgaagttaatgtatcaggaaatagtcttcaaggaacaaactgaggcggcttcaaactaaccctacttttgtgacttgtcagttctccctaaccatttcctacagtactttcatttcataattcttacctcctcagctaaacattcaagagaaggaaaaaatcacatttaagtgcagaggagaaaaatacatgagatttctatctaataaatgcattgacatttcagtctctattttttatctattttttacagtatgggcattacatttagggctccatgaacgacaggcaagcaattttaccacaaagaactatacccttcaaattttcataatatagggcttggtttttcttcataccaaagagaaaaaaaacagtctaacttttccctttccttttaaaaatagtattattgtataaggtgtgtgtgcctgtgtgcgtgcacttgcgaacgtggcctacttgtgtggaagtcagagaacaacttttgggagatagctctcttcttctactgcaggtccaaggattaaagcaggtcaacaagcctgtatggaaagtgattttgcctgctgaaccatctcactggcatttttttttttttaatttttgagacagggtcacaggtagctgtggttggcctccaactcaccatatagcagaagacgacctaaccacaagttcccctgccaatacccaagtgctgacattacaggtttgtgctaccatggacggtttttaatctttcttcttcttcttttttttttttcttgagacagggtttctctgtagctttggagcctgtcctggaacttgctttttagaccaggttggctttgaattcacagaaattctcctgtctcttcctcctcagtgctgggattaaaggcgtgcgccaccacccaccaggcttccaattttcaaagacagagaataagacagagaaaggaccttcttttgagtttggtcacataacataaataatttccttacctcttagacatgtcccagactcgaatactcttgtcctcagaattgctgaggatcagctcttggcgagggtggaagacagcacaagatacattgttgtaatggccccggcaggtgtcaacctcccatgcttttgattctgaagaacaaaaggaattatgatcacaattctctataactctggaatctacaaacctaacatcctttttaaaaaatattattttatttgtatttttaattgtctgtgtatctttgtatgggtttgtgcctgtggaggcctgtggaggccagaaggcagcattggaatccccagagctggagtaacaggtggttgtgaaatgcctgacataggtgctaggaaccaaaatcaggtcctctgcaggtccactgagctatctcttgaagagacaaggttttgctatgtttctctgctggccttgtacttgtgatcctcttgcctcaactcataaatgctgagactacaaggacggactgccatgtctagctgtgaaactcttttttttttttttttttttttttggtttttcgagacagagtttctctgtgtagctttggagcccatcctggcacttgctctggagaccaggctggccacgaactcacagagatcagtctgcctctgccttcagagtgctgggatcaaaggcgtgcaccaccaaggcccagctagctgtgatactcttaatcaagtgctaagtactactgcaaaatactaaattatttttttcccccaaatgggcaatgtttttcatttaagtctcttcctctttatgtattttattggcttgttttggtttttgtcgtcgttatttactctagtcccaacaccctcttttttgaggtgagacaaagttttgctgtgctacacaggctggctttgaattcctaggaacaaataatcctacggactaagcctcttgagtagctggagctattatcacatgctatctcagctctaagtttcctagtttttctgtacatctctgttcattctgagcccttactgactacaatacctatattaaaaaattctttgttttggccggggcgtaggtggcgcacgcctttaaacccagcactcgggaggcagaggcaggcaaatctctgtgagttcaaggccagcctggtctccacagtgtgtgccaaaacaggctccaaaactacacagagaaaccctgtcttgaaaaaccaaaaaaaaaaaaaaatttaaaaaattctttgtttttactctgttttgttctcttggtatatatcactatctgacattttagagcaataaaaactctatggcctgggattttctagtcacaataatataaatagagtcctgaacatggtctaaaacacaacagttactatttgtcaaatgactgcatgaattttcactcttaactatgctcatgtctctgaaaatcaggttacagtcatggggaaaaaggaagagataacaatgactatgcacttagaactagcaggaaataattacctcaggcagaaaacagattaaagtccagaagacctggcacctttcccttgctggccagcagtcactttcttggatatggaaacaccaccacaccaataccttactcaccattcatgcgccagatcttcacttgccggtcatctgccccagacacaataaggggcatagtagggtgaaaggcagcccagtttactccacgatcatgaccctgttaaagaggaaaggtgggtcttccaaacagctttaaagacacaattcaaagcaatcatgctggcgtttctttttcaggaatttgggtgttctaactcagggccttgcataggctaagccagcactctaccacagagctatttccccagccctctgaaacactcaagaaaaaagactcaaggtctgggccactgtaaagttcatttgctgctattgttttattttcatttgatttggttttttgagagaaggtcttgttgtatagactgacttgggtttgaacgccagacctttatgtttcagcctcctggagtacagatatgtggcattatgtaaagctttaaacattagaataaaccatgttaatctgtccactattgcttcaaattctcatgggttgttccaaagattcctaccaggaaattcagttttatttgtatttaggatttttgccttcctttctgcttgtctatgtatattttatttctccaagtaattgtgtaaagtataaagacctattttataagttaatgcagaagatcttaaagtataatctggaatcccttggaggagttccacgatccacctggaaagtttttaagttcaaagctatcttcctaaccctaagactttacttgcttttattgttattatccatgttttccactagttacatgataggtgatgacatcattgctctggcagataatgagatgtatgctgacaaagtccatatttttaaagatttttagttttaggctggaggtataattcaatggtagagcaactgcttaatatgtgcaaggtacccaggttctattcctagcaccaaacacacacacacacacacacacacacacacacacacacaccaaaaaacaaggggctgaagagatggctcattggttaagagtatgggtcccagcaaccatatatgattgctcctaactgcctgtaactccagtcccaagggatctattgccctcttttggcctctgaaggcatcagacattcatttggttcagaatacttgcaagtaaaacactttaaaacatttttttctaattgaaaatagattcttctttcattcaatacatcccaaccacaacttcccttccctccactcttcccttgctcctcccaaaagtaaaacactcttatacacaaaaataaagaaacccgtttcatttcaaatatggctaaaattaacagatataaaacaaaaatagactctttgggattgttatgaaaatttaagagtataaagaccaaaaagtttaaggatgataacttcaagatagcatcttttctatttacctagttgtacttcattctttaacagaattatggataagacagttttggttcagaagtattttaaaattatgtgtttgtaaaagcatttggatttcgaagttagagccacttttggatcccaacattctctgcatatacctagactttggctaactgtgtaatttctctaagtaccatttttttccatctgtgagcttaaacagtacacatttcagtgtactttttaatttttttttttaattttagaaaatctagtttctcttcttcctttctccccactggattgacaagatggcataatgttccctgagatgacacatattctccctttcattgatggcttacttacaattctatcctccaaacctcaaatggtgcctggaacttcaacatttgctgaaagaatgaaaaaatgtgggccatcgaaaacagcttagtggataaaatgcttgctccctaagccacagttcaaatcccgggatgggacccacaaaaagatgaccagaaggaactctacaaacttgtcctctggactccacatgtgttgtgcacacatgcccacacacatcacatacagagatgaaaataaaaagaacaggagctggagagatggctcagaggttaagagcactgactgctcttccagaggtcctgagttcaattcccagcaaccacatggtggctcacaaccatccgttatgagatctggtgccctcttctggtgtgcagatatacatggaagcaaaatgttgtatacataataaataaataagatcttaaaaaaaaaaaaagaaaagaaaaagaacagcatactgagatcttcccctagagggcagcacatccgaacccccgaccacagagacaaatacctcaaggacatgcttcaccactgcatctgtagttccaaacagatcaaccccagtgatgcctctcacatcagactccacagcaccaggagacaaattttttttccttagacctttggagggttaaagagtgggacaagagatgcaaacacaatgtcgtaagcaaagtagcagaaccacacaaaggtatattgaaagactaagataaaatgaaacaggcgagtaaacacagagggaaggaggaaaggcgctactctcaagcaggtctacctacctccgtgtgcaggagctccttctgaacactcacaagatcccctgctggagtcaacccaaattgcccacacaactcagtttatgaactcttacctcaacaggctgtctacttcagattagagcacgtgccatcctttaaacgtccccaaacatggcctcaaatggtaatcattcattcaatgtctactttcatagagtctatagcaacctttccccatcatcttaaaattttatttttttcaccttttaatttctaaatgcattttattatttgatgtatatgggtgtttgcctacacacatgtccacatacatgtccactgcccacagaggccagaagagggctacagatctcctggaactaaagttacaagtgtttggaagctgccaagtgggtgctaggaattgaactccaggtcctttgtaagagttgtcactgctcttagccactgagccatatctccaattctcaaaataaaagcaatttaaggagattgcacttcagtgttttccaaactggaagcaacatactgagacattccagatgcattgcagaactatacatatcaaacaaaaacagccatctagtttggaagaactattacaaatactatgagaagatatagcaataaggtactagcaaaaagtgtactcacaccttctacttgcctcttggacaggacaccaaataattaaaactgttatgatttttcatgttcttgcataaaaggctgcttacagatacgtatttttccattaacctacagatgctaatttcactgggaggaattattagctgacaattttgctgttgttttttggtttttgaggcagggtttcactgtatagccctagccctcctggacctcactctgtacaccaggctggcatcaaattcacagagatccacctgcctctgcctcctgagtgctgggattaagggcatgagctgccatccctggctgataatttttaaatgataggcaaaagacagcagcagggtaagaagtgttttatttgtggatgagccatgtttatgattcatctacacatctttaaagatgtggtagcttagacatgcaattttagcactcaggaagtagatgcaggaggactgccacaagttgagcctgggccacgtagtgagcttcaggctagcctgggctacagagaaaagccctatttcttttctttttccttttctttcttttttctttttcttttttgcaaagccctatttgaaaaagcagggagaagtggggaaaagctatttgtgtcaaagccagaaccaaaattatagtacaaagtaccgtatcagatttaattctgataacaacccttagaaataggtaatagtcatgtatattatacaggttacacataacaaaacaaaattgggaaaaaaatctttaaaatatttgggagaaaaaaaaacggtaagataaagttactcaacatttgttaaatttttatttttttttatttttttggttgtttttttttgtttgtttgttttttcgagacagggtttctctgtgtagctttggagcctatcctggcactggctctggagaccaggctggcctcgaactcacagagatccgcctgcctctgcctcccgagtgctgggattaaaggcgtgcgccaccaacgcctggcaacatttgttaaattttttacacagacagtattttaaaacagggactaaataaaacatatcattgaaaataaaatctaagaaacttcagactaaaatgtggcatctgtagagaaagaaaaaaaagttaagttcaatgactgaagttatcactattgctttaaactataatgtattgtttccgttaggatagcatctaccatcagcattggagttttaattagtttatgccccattaagagaatgctatagagacataaaagtgatgaaaaaaagtactctcctcaagcttcataagtacatgagcacaagtatgccttttacttatttcatttgtccctttaataggatctgtcaactttttctaatgaggctagtgtatgaaataggttcaaagaaagatacaaaagcagacagctgtgaggaacttcacctccaatatgcttcaacaaacacattaaaaagaaagctgtacgacagaattgaagcctttgttgcacttgcctgcaatgattcaggaaaagggaagggcaaaacagatgaatagtgacaggcagtgaaagatacttagagaagaaatatttgagccttcgataagccactcactaggactgagcgacagatggaaaatttctacagcagctacccaaatccagagggagaggagaacactctcagaatggaccagttattattgtatgcctcccagtggggtccacaggaagcagtaaagagagagggatgaggaaagggtttggcagcgtattaatacattttagtagatatttcaaagagtgagcctgaattacacaggcttgacatgcaaagatgtaagcatattaaaataatttaactgacagttaacttggaagcacaagctaatacagtaacccatcttccatagctagtttttaaagcttcccccccccccaaaaaaaatgatgtttgccaggctataagaatattcaggttatagtaagctccaggggctaaatccacatgagagaggtgttaagggattgctttgcctctaaagacttctacattctcttggtgttacccactgagtgttcttttcaagggagtcaaaataaccagaaatttcacagtcccctaaatttgggagtattcattcccttattcagaaggtctttcctgtgttggaaatgttatcatcagtccgtaagagaaagctggtttctcttactgtgttcagattttcctgaactaaaggaaaatggaattctgaagagtgtgctaattttgaggacaggaaaatgtaagtgtaaaaagtctaatccaaatgttcttccacttatttaaataccaaagcatctccttacactctggttaagggattacttaggtcaatagattcagcagagaaatgataaagaaagttcatattagtatagcaagttagcacaacaatctccccataaatctacaaacaatagaagttgcaataccacatagcaatcaatccatgcaattcacacattcaagagcaacacaaaccccactaaggtcagactctccctgactcctctaatctaaggcccttaatttgcatgtaaacatgttttctgcctgcaaaaggtgaagaaagtactacttgccctgggcattttatagtcacaaatgagaatctagccactgtacttccccaaattgcttcttattttaattagcagattttcaataatgtatttcccaaatcatgttagctagaccacagggaacatgctgtgctagcagcaggtggcacaagcagtaagtggaacagtgtaagagccttctcaacccaatgttctggggacgaacccctaatacctaaaaacaatttacgtatgaaattaatgtatattctagggtagaattagctgtacattattcctgggagaactgagaaaagtcactcaagatacttcctctagcacgtttctcacagaacttaagactattccacataactttccctgatcagtggggacagcatgagctgggagcaaacctcatttggtacatatgtcctgagacagacaggatgtcttgaatgtgtgcaaggagaaaccctctgaaaagccacagctaggttattgcagagtgaatgctaagctccccagaactggcagtgaggagagggcacaggctcacggtgcctgtactgagctcctcctgttggcatggctggtctcatctgggtgtacttcaaatagcccagtcggtctgacggaaaactgcaatggcaaagccctagaggatgaacataactgccctatctcccaaacggtcttgtttacaccactgtcttgcaagtctaagcttttgaaaactgcagagacagcatgacacagtagccccactctccaactaccctcctctctccttgacttgacctccgtacccctaccccattttggtttggttctttcagacagggtcttatgtagcccaggctagccttgaactcattatgtactcaagaatgactttgaatttctgatcttcctgtttctacctcccaaatgctggcattacagcatgcaagaccatacccaattcccttagcttatttctacaatacataaattgtaattgctactacaacattccaaatgttgtatttaggaatccaaattttttacttgctgtttcactaatggtttataaaaacagcaatgactaaactgccctaacccagcactgtcagagagaagttgggtagttaccacgttagcagtataaagggaaagcaaactgctttaatgatatagagaagcaggtaagggcccatgaggcccttcctattttgggaagaatcagtgtttatacagtcttacatgactttcctaagaactcgatttcttagaatttctgaagtggcaaataaaggttatttagtaagtttttttttttttttttttttttttttttttttatgtaactgggcagagaagcttagcatttagagtctcagttccctattacaggacgaagcccctccacgcatgtcatagatagcatcctctcttggtgtttcaattctccattcgacaacattttagatctctgtatgacactaaaatttcaatctttatctcaaaagtcattatatataaactacgacaggaagaattggcctaattaaccaaagatcttagaaagctttataagaaagtattctgaataaaaaatttgtcaactcccattatttgttcccattctttgttgttatagaagcaatccaataggaagacttttctctttataaataaggcaatgggactcattttctttttcttttttgtaaaatatgtatcttgagtggaaagcttggttcttaataattcagatgtacatattttaatgaaaatctgtgataactaaaaaatcaatgcagcttcctagagtaagccactttcatagaaaatactgctaacatgaagaactatcaaagcacactcaataccttaaaaaacaacgatattatacaggaatggaatattctgaattttgttgttctaacccttgttgttttaagcaattgcagttttgcgccagacatgactagattgtcccctgaacttgggcagctcaccagaaatatcccaaactcggacagtctggtccaggctagctgataccaccaggtcttcagaggggtggaactgagcacacattacataatggttgtgtcctgttaacacactgcaaggaaaaaacaaacaaacaaacattaaattaaaggcagaaatcaacagactcctaagctaaatcactttcttcatagtcaatggatgcttttctgattctatttttgtagaggcaatgtaaatcatcctcacaattctgaactagtattaagaatgccacctgtgctaacacccagctaatagctcctttttagaaatatatatttctttttttgccaggcagtggtggcatatgactttgatcccagccaggaggcagagggaagcagacctctgagttcaaggccagcctagtctacagagtgagttccaggacatccagggctacaaagaaaccctgtcctgaaaaaaaccaagcaaataaacaaataccaaagcggtagggtcagttctctccttccacctttacatggatcaagctcaggtcaccagacttgcatggcacctttttgcctactccaataattctttttctgacactaattgcttaatatttaaacattactcacttcatggaactgagagtactatctcagattaaagacttataaaaatatgaaaattaatgcaatcttagcaattaatataggagatatgtttgatagattttagtagggtacctttaatggctgttgttggaaattcttatggaaattgtactagaggaccagtccaaacactagttagactcattgtgtatatcccaactcaagttttatgggaatagaagtgaaaaggaactaaacgctctattccaaaagcctagttatatgaccctattcttcttaagataacacaaaaatccatattggtattactatatttaaaagaatcctacaaatatcagtaattaattagcagatatggcctgccagggaaagaagataactgacctgagaagaagctgattataaatatttaggaagacctaaaacccctttttgaggctactgcctcttggtttaccagacacaggttctagactgccagttccacactcgaatggtctggtcatctgaggcactcagaatccaagggtattcctgaaagacatttcagaggacggcctcaacaatgctgttctgtcagaccagagcatcgtgaatgcttgacaagtattctctcattgagttacatcccagcccttgcttttttcagacagggtctcactatatagtttaggctagccttaaactatgtagccacaagaacccagcttcttattcatagttgtagctctattgtttagcaaagagacatatacatacttttaagctttctatgtggccctggctgtcctggaactcacaatgtagatcaggttggcctcaaactcatagagatctgcctgcctctgcctccaggatgctgggaggcatgcctttaattttaatcccaacacttgaaaggcagaggcaggtgaatctctttgggttggaggccaacctggtcaatacagtgagttccaggacagtcagagatacacagtgagaccctgtttcaaaaaccaaaaccaaatctatatccctaatctccaccccaaaattagtcatattttaagatttttaaggacataagcaaactcaatcattaaatacttgcttacttcaattatagcactgaattatagggacaccttaaacatgacagaattagactaagaggccaggcatctctgtaacttactctctaatctactacgaaaccagagaaatggcaaggcattgtggctctcacctttaacccaatcacttgggagacataagccactggatctctgtgagttcaaagtcaacctgactatgtctacatagtgagttccaggccagacactgctacatagtaaaaggaaacagagggagagggagagggagagagagggagagagaaacttgatagctcaaaaaagggagacagcctgagcctggctaggagaacaggttccaccagaccccaaaatccttggacagaggaacctgattgttaatacttcaaaatgtttacagtatgctacttcgacctttgaccttctgggcctatctaattcttaataacaataccacacatgggatcagcctactactcactcttgtttggcagctcagcaaacaaaataaaatgcctacatttttctatggaaaggcaatgacttcctcttagagcccactggatccaattaagctgagtataactgtaggggaagctgtagccatgccttcttaggggctggctacaagagtacctgagagcttgtgagggcgtggtcagagtgagtagggggactgcattttcggtttcggtttctctttgcttcttgctgtacagactaccaccggctggctggttcgctctgtaagtaaggcttttccctattaaatacccttatatttctacctgactccgtattggtaatttcttactatatataacctcatctgtctgtctctgtcttcccagcattgtgtgctaccatgcttagttttttatgtgggtgttggggatagaactcatatccccatgcctgtgtggaagcacttaccaactgaactatccccctcaatcctaaagcatgggctcttgaggacacagagtactgctgtgggtatcgctcaatggtagagcattttgctggtatttataagacaccaggcccactgcccagcatggcaaaaaaaaaaaaaaaaggaaggaaggaaggaaggaagaaaggaaggaaggaaggaaggaaggaaggaaggaaggaaggaaggaaggaaggaaggttgatcagttagttggtcaggccaggcatacaaattactatagagaaattatggaacactacacaatgaagctcaacagccacttacatgatgaaaaaatgtggtacgaatataatctaagtgcccaagcaacgtgaagaggcagcgccgaagtttataattccaaacctgaaaagacagaaattcaaccaagaaataggatgtaaacatcttggacttatgaaagtcttatcaggttcttttgtttgcttgcttgtttgagacagggttttcacatagcctaggttgtccttgtgcttgctatgaagccaacaatgaccttgaatcctgcctcctgaatgctgagacccatttttttttttaaaagattttatttattatgtatacagtcttctgcctgcatgcagatctcattcaaggtggctgtgagccaccatgtagttgctgggaattgaactcaggacctctggaagaacagtcagtgctcttaactgctgagccatctctccagccctgagacccagttttatatggtgctaaacttcaaaaatgttaggtaagtattccacttaaatgagccacatccgaagccctgaaatctattttggagaaccaaagttgctgcacttttacctttattgtagtcaaccttcaaagaactgccttctatggactatctcacctaacattaaggtgccactattactaataagctcctaattcagcaatctaaaggtttcttcttagtctggctcttattctgacgacttcatctttccccaaacttccttcgtccttggtttttccctggttcatctccaaactataaaatcactctttcctacaccaatacttcttcttttcccctttaagtagagttggggtttaataaagatatcttaatgcagacttaagcacaaggagtaaaagaggtactcagaacaaagtaagacacacccaagagcatgaatatatacaggcttctcttaagtcacaaaatgtaagacatatcttcatatgggaatgggctcaagggaaaggtgcctctctctttcttagattatcattcaaactattcccgtgcagcaccttttagactatggctttagcttcctccttcttgctgacaaatcccaagtatcttcagtgagtctcctaggttcctcaagcacattagagacaatatggaattatccattcttcaaaactccacatttgactttctaagttaatgacctcctgttagggctggggacgtaactcagtggtggagtactttctgagtacacagatcaattcccagcacggaggagaaaaatacctcaatgatatcccattcacttttctcgatcatacctccaatatccaaacaaccactggttcttttccttaagctcttattccatctcctctctatttcaaatggtattgcctaagttcaggctcttgccacaagtacttataaaagtttcctcattggtatctatgtttttagtccttctcaattcatccaatcttttctttgctatcatttgagtaatttaaaaaataaaatcaatgtaaatcttaaaccactcttacatataagccccagtattggttctgtgcttgtgtaataacaagagaactcctgagcactgcaaacatacacacacgatctcacctatcttcaagatctatcttctgccccctttcactattctagagtatctatctaaaaggaaatggagattctcaaacacatccagctatgccacgtacagcttcatacttggactgttctttcctgttttgagtatttcttatatcattaactgaaccagtttacggtttcttgctgcaatgaaataccatgaccaaaaagcaagttgaggaggaaagggtttatttggcttgtacttccgcattgctgttcatcactgaaggaagtcaggacgggaactcaaaagggcagaatccaggaggcaggagctgatgcagaggccacggaggggaactgcttactggcttgcttcacatagcttactcaacctgttttcttatagaacccaggaccagcagcctaaccatgggctgggctctccctcaatgatcactaaatgagaaaataccttacagctgtatctcatggaagcatttcctcaattaagggtcccttctctgaagactctaggttgtatcaagtcaacacacaaaatcagccaatacacgtaacgtggtattatttgagtgtacatttatctcttgtattataataaaggctccttgagaacaaaagttactttgtacttatctttcaattcccacacaaaagaaaagtttctgatatatagtaagtattcagggtttgctggacaagtggtttggataatgttacaagtccaagttctctataaatgaattctcctgtctttcagttcctcaattcccaaatcttaccacattcttttatccattattcccagccatgacagactgatcgcctgtaccttaatcttatagtcatctcctccagagacaaacagtggctgctgcttatggaagtcaatgcctcgcactggacctagggaagaaggcaatatatgttaaggaaagttatctatcctctatttatttgtgtgtatgtgtgtggtgtacatgcagaggtcagaagacaaattgcagagtcaactctctccttctaccatatgggtcctggggatggaagtcaagtaactcaggcttggcagcgtttgttaactctctgagccatctcatcagtccctattaagaatctttttcttttaacaaaaatacagacctactttcatatatttaattttcattagtttaaatccgtgaggggtacacaatcatggagattctgtgtccgatggcctttgtagagaggtggcttcaggactgaaccatgccactgttcctgagattcctttccccagatcactctggttttgttggctttgtctccaggactcactgtgttgtttttccgctttatacacacaagcacatctcttgcccaagtagaattcagtttcatctcagccataaacaccctcaatttattgattgattgattgattgattggtttttcgagacaagatttctctgtagctttggaggctgtcctggaacaaactctgtagaccaggctggcctcaaactcacagagatccacctacctccgcctcccaagtgctgggattaaaggcgtgcgccaccaacacctggtcaaacacctttaatttaaagaagagctgagtgctttctttggtttcagagacttcacttataggcaggaaaaatggtcttacaccagtcttccagacatacttgtcttttagaagttctatacccagcaggcctccacaggtgccaagatggtggaaagaaccttaataagattcttttgttgttgttttttgagacaggtgttttcttctctgtgtggccctggctgtcctggaactcagagatctgtctgcctctgtctccagagtgctggggctaaaggcatgagccaccgccacctggcttaagaattctatttgtagtttttttgtttgtttgtttgtttgtttctacccctttccacttccacattctttagttttagggggaatccttgtcaaactaggtttcttatttgggggatgattaaatcaccctatacaataataaatacttggtctttaaaaatattcattaaaaattcatttttattatgtgtatacgcatgtgcacatgtgttcaagtgctggtggaggccaaaagagagtaccagatcccttggagctggagttacagattggttatgagccctggaatgatgtgagtgcagggaattgaactcaggtccttttcaagaacagttagaacttttcaccactgagccatctctctagctccaatacatatatcctttagtccccaccccaccccagaaactaacttaccatcatgttcatcaaacttgtcaatgagagtgcacatgcgatagtcccataactggatgaccccattgtgtaaactggtcaggatccagggtcttttgggatgaaaactaaggcctggagaagagggaaaaaaaagcagaaaattatacaatgaggtaaggtccctgatgtcatcttttgtcgagtcttattttaaaaaggaacaactagatcaaccagaggctatctatctatttcttcaacatacttgataactttccccctaatttttaaattatctctgtgtagctctggctgccccagaacttcaagagtttcacctgtctctgcttccctgagtgctacgattaaaggcacatagtatcattacccagctgatagctagcttttgattggacaccaaatacaataaatcttactgttagagattcctttaaacattgctgagctttgttctgaggtgtgtcatagttggaatcagctcacagatattaccttaagttttgttactgtgagtctacagctgcctttatagtctaggtctaatgtggaaccatgctaagggaatacccaccagagggtctctataggatgctcaatactgtcaagaaatccttcttaatcgatgagccatctctctagccccacagacaataaaaaatctttttgtttctttcataggagcacagactatttccagctttgtgtgagctccagggactactgttctgctttctcttttcattcttcatttaaaaattattattaagatttgttttgtgccgggcagtggtggcacacgcctttaatcccagcactctagaggcagaggcaggcggatctctgttagttcgaggccagcctgttctacagagttagatctaggatagctagggctgttaacacagagaaatcctgtctcgaaaaaccacacacacacaaaaaaaaaaaaaaaaaaaaaagggaagaaaagaaaaaaacttgtttttgtattgtttttaattatgtttaggtatgtgtctgtgtgtggacatgtacacacaagtgcaggtatctataagccagatgtgctggatcctctagaacttgagttacaggtggttgtgaggccccagcatgagttctgggaactgaatttgggtactctggaagaatactactcagctacctcaattattattttttttctcttttttaaaacagatagacctcactcttacatgtaggctggcctccaaatcacaatcttcccacctcagcctcccagtgtaggatcagaggaatgtacaaccaccataactatcacttaattttttaatacattttatatgtattatgtgtatgagtattttgcctatatgtgtctatgtacatgacatgcatgcctgttgcctgtggaggtcagaagagggcatcagatcctctgcaactggagttacaaatggttaggagccaccacataggtactgaaaactgaacctgggtcttctgcaagagcagcaagtgttcctaaccactgagccatctctccagtcccacaactacctcttggtggctctttcctaaatcctaaaatacttttctcacatgaatgtacctatcaacactctaacaagggcccagggaaccaatacagaccccaatgctctccctttgctgctatttcccaagcatattttagccatctgtgttgttccaaatgctgaaaacttgttcctcagttaaaccacaggattcttctttcttccttcattacaggctggaatctctctctaactaactgaaacaaacataggacttgcccagttttatttcccttccctcaagaaataatctcctggactctttactaaccactgtctgaaacctttgtagtttggcttagttgtttagcaatttaaggcaggaaaacaaatctagtccttgttattccatcagggtgataaaagaacaaactggaagaacaaactgttagcagtttgaagtgtgtccaggtttttaatgcagctacatataaacacaggccttactattttatggacatggaatcataggatgctattttgcaaacctttctcacttaaatatatgacataaatctttttacacttcaattaatggaaactcattcttttttacaactgtaaggaacaaaggcaccatacttaaaatgtttaattacatgtatttactatatatgcacatgtgttttcatgtgggcacacatgtatcagaatgcatgcatggaagtccgaggaaaacctatataaatgttggctatgtataaaacattgaaaaaacaaacaaacaaaaacaaaaacaaaacaaaacaaaaaagaaaacctagcaggtatcaattccctcctaccatatggccttggggactgaacttaggtcatcaggcttggtggtaagaactttaaccactgagtcatctcactagtctattgtattttaagctattttggagttggatatttactttagtgggagagaggtggcttgcctagtgctgagtttagtcacatacacacaaacacacacaaactcacaagtggagcatggtatcacacacctgtaatcctgcatctgggagcctgaggcccacatgggttatatagggagacatggtcaaaaaaaaaaaaaggacaaacaaaaccaaatataaacaaacaagaaaaccaccttattcttagaaaacatttacatttcacctccagttgctggcaatcaccactgctgaagccaggcagtagtggtgcacacctttactttcaggactcagaaggcagaggcagaggcagagaggcagagagaggcagagagaggcagagagagagagaggcagagagagaggcagagagaggcagagagaggcagagaggcagagaggcagagaggcagaggcagaggcagaggcagaggcagaggcagaggcaggagagtctctgtgaattaaaggtcagcctgatctacagagtgagttctaggacagccagggtcattatacagagaaaccttgtctcaaaaacaaaacaaaataaaaaaagaactttaggctaaagacttgaaaatggaatggctacaaaatagagcatatacattaaaaagtttttattacatttatttgtgagtgtataatgtgtctgtgtccatatgcacacaggccatgacatatgtgtgagaatcaactctctccttccatgtgggtcatggggatcaaggcttggtgacaggcacctatactcactgagccatctcagtggcttagaacatgcacatttaatgttttggtaaatgtttggggctttgttgctgatgtttttgtcttccagagctaagatttctttgccagggctgtcttgaaactctcttctactactactactactacgcttgcctcaagtttgagatctgcctgcttctgtgccaccacacccagcaattttttttttaattccttgttttttgtttttgttttctttttcttttccctgacacagttcctctgtggctttggaggctgtcctagaactagctttgtagaccaggctggctttgaactcacagagatccacctgtctctctctctctctccctcctgactgctgggagtaaaggcgtgcaccaccattatctggctaatgtttgggttttttaaaacagggtctcattttgtagttcaggctagtctcagacttgcagcaacccttttgccttagcctcccacgtgctgggcttacagatgagagccacaacgtccaactctggtagctattgcttagttgtaaagacatagtatatgaatatcagcaagtttatgaaggcacctattttgcatggtgtttcttttatttttatgattactggtaacaccttttcgttttcttttggacaggtttcaccatgtagcctccaattcacagcaattctcttgcctcagcctctcatgtgctgggatttacagacacaaaccacagcgtccaacttagcacttaaaatttttaaaaatctttaactatgtgtgtccgtgtggaagttatgtgcacattagtacagatgcctaaaggggaacagacaagggcactggatcccacagagctgagtgataggcagttgtgagccacgtgacatggatgatggaaatcaaactgtacgaacagcatacactcttaaccccgattcaacaatttccatgaactcttaatactcatcccctctacacctttctacagactgagaagacatctaaaaagaataggaaatgaagactcatttcaaactcagaaactggttttgtttgtttgtttgttttttaaattacgtttgggcacttgagttcaggtgccccatggagcccagaagacgggatcagatcatctggagctaaatttacaggtggttgtgagctgccaaacatgggaactgggaaacaaactcaagtcctctgcaagagcagtaattcagctaggcggtggcagtggtggtggtacatcccagcactcaggaggcagaggcaggcagatctctctgagttccaggtcagcctggtttacagagtgagttccaggacagtcaaggctacacagagaaaccctgtctcaaaacaaacaaacaaacaaacaaacaaaaagcagtaaatcttgttaatggagccatctctctctagccctaaaccttttttttgggggggggggaataatgcttcactgtgtagctttgactggcctggagttcactgtatagaccaggctggcctctaactcacagagatccacctgcatctggctccagagtgctgggattaaagccactgtgactggcaccagagatgacagttctttcttttttctttttttttttttccgttttgagacagactctctacatagtcatggtggtagtaggaactctcaatggtacccttcatgaccaaaattcccacaagactcagaaactgctcagaatatagcctcacattaaatagcctccagtttttgagttactgagtctggccaggaattattataaacatatttaatatactttcacatttttattctctttataatgttaattacctttatttttaaaaataagaatgcagagatttagagatcgtaagtatgccacctaaggtcatatagcttgttagtggatgtttcagaattcctcagcaagtccacttgactccaaagaacaaattccaaatcacttcactataatgcatttttaggaaatattccagatatatttttaaccagatttctgtaggcttaattctctgctcttctaatttcaacattacgaaagagtgtgatctcaggcattcgttcttcaaaaaaatattaccaaaaaaatcgtttatgtgatattcaaacctaatacaaagcatcttgtatttcgttcatcgaacagtcttacagtttctggattttaggggtctgtaagcaagcaggcaataacgtccaacggaagcactggacatggagacggtgcagacaggctaaggcagtagccggtgcctgactccagaagcgacacagtgacagaggctgagaacccagccccgggggtactccgtagaatacggtcatcaaaaagcataaaagtcacaaggccttaacaacagagagagtaaaagccggagcgcagcccccagaagaggtggatggagcaggaagcgggcctagtgatctcttcaatgtaggagccatttcacgagtaaaccaaaccccgggactcactgagaagcgcagagtgcggagactccgccagccctaggccgcctccctcggctattccgctgggttcgagcgggcccaagccggtgggcgagcccgcccgcccgccggttctctcttccttagtgacagcaccgcccccaacccccaagctgcgctgttcccctcttcctcctcactacctttgacccgcgcgctcttggtctcgaatttggttagcatccttcaggcctcgggctcccaggtccgactacccagccccgccgctcccggttgccttcccaaagtctccacgtcagctacccgaggtcgtggctcccggaagcgcctcagacactaacttccggtctctggagccctgggccacagagacggtgccagcggaagcctagagaggccgatacgaggctggaaggggcccgaggcttccgctcagcggagaggcaagatggctacaactaggggcggctctgggcctgacccaggaagtcggggtcttcttctccttctgtctttttccgtgatactggcaggtgaggccaccccaccccggagctccgctccgtaaggagaaccgtcccgatcggcccatcgcaagtgcaggcgttgtcgcccttctggttccctttgcccctctgtcccccccgccctgtaaatccttcttgtctttcgttcccatgacataagttcccccttggcctggaccttcatttcttacctcccgaggcacgtcgtttcccttagttctctccaacccctttttgggtttccaacctgattctcttcttccttattcgcatgccccgttttctttaaagccccagccaccccacccacagtcaaaagggacaggtgtaaaaagctcaacctcccttcgctggtttagtaattttgagaccaaaagtcttgtcttgtgggcgcttctgcaacactggaaaagagagagagagacagagagacagagacagagagagagagagaaagagagagagcgctcatttcctcctgtcagtgttctacactaatagtgtgtcccttattttctttattttctaaagtgaggctaacgtggccttggccgctttaaactgctaggagggaagtaatgattcaaggaattttagacatttaatgtagatgaatattttcattttttaaaatctaatatttactaattttgcaattgtgaattacactcactcacacatctgtaattctttctagtatgttcaactaagaaattaagcagagctgtgtttccttatatgtatatggctttttagttaagccctaaaatgcaatcatttctgtttatacccatgactgtatctcccctacttcacactgtttttgaccatcttcaagggagaaactgtagctgccccatactctaggtgtgcacacaaatgatcaggtgtttgattcacctaacaggtgtgtggcataaggtttctcctaggtctgttcagattcttagctgggttttgttgttgaatgcttttctttgtttgttttggtaatctatattcttagaccagaagtatttttctaactaattagtaatatacatacaaaatagaaaagcagaagtatttacccatacagctagatgctttttcaaaggcttttcttttgacaaattatattttagctttattgttaattgatcttcatggagtttaataacttcctaagatacatagctaaatacttatacaacagttatgttccaataatatggctaaagaagtgaaaacaatgatcattaatcccatgttagacaatatgactagtgaatgatttacctaaaccatgaatcaagctaattatgatagacgctaataccgaatacctttccctttttgctaatattgtttatcttctggtcaggattgtgtcggggaaactcagtggagaggaaaatctacatccccttaaatagaacagctccttgtgtccgcctgctcaatgccactcatcagattggctgccagtgtaagttgaacttgggatttgtatttgtggccattaataattcagtgtgtatcctggatactcagaaatactcgtgtcctgcttaagaatcttggcattcaaattaaagtgtgtgtgtgtgtataggaagtgattatcatctgtcaaaccaggcaagataataagagctaaaatttagtaaatgctgttttaatatgtgcattttacttttacctctgcaacaatccttgttgttaacattgtacaaactgtggaactaaaacttaaaagaattgcttctcttccccagcatcatcatgatagtaagaaatcatgctaggatctgaatcctggtgtgactcttaactctcttaccatacagttgtctaagtaaaaagaaatctcacattctatggaatctaatcatcactctggcactctgagtgatctttttttttttttttttttaacccaaatggctttttttctttttttcatttgaacagaaccttgctgtataccccagtctggctttaggcttctgggactgcaaacatgtaccactatttgtctaagctttcagttgttatttttgatactgttgtttgaatccctaccctcaagctagtatccccaacaagcccccccactcagcttcttcaagggcagtaaactagttgaagaaaaggcattacaaatgctaagcagggggactgtagagatggttcagtgattaagagcacttgttgctcttgcagtaggctggtttttggttcccagtactcacatggtgactctcaactgtccattactcctgttccaggaggtctgatgatgcttctaacctctgcgggcactgagcacatacatgcatgcaggcgaaacgctcatgcacatgaatagtttttaaaaatatttgtttttatttgttctgttttttaatgacaactaagggctgcagacacggctcagtgggtcaaagaaaagctgtcgggtatgcatggcaatctgaatttgaatctctagaacccacatttaaaaaaaaaaaaaacaaaaaactagagttgtaatgtgactgtttataaccctagcactcctatagagagactggatgcaaagacagagagtctatggaaactcacaggccaggtagtctgttgtgtacagcagaaaaacaacaaagagatcctttcacaaacaagatagaagactggacagatagctgatgttgtctgctatcaggcatctgcacacacgtacacacaaatgccaagtaagggctggggtttaagtagtcagtagagtgctttcctagcaaatccaaagtcctgactttagtccctagcaccatatgaattatatatagtagcacggctatgatcacaacacccaggaggtcggttgctaaagccagcctgaactagagaccctattgccaatcccatccatcaaataaatagttgtaagagaaataaatgaagtatttggacttatccttgtactttgtaaatgtgttccaacgcagaatatcatgacagcactatcgctctcaacactgtataagttgctggaagtgtaactcagtggtagagcatgtgcctatatgtacaaggccctgaattcagtctctgagtactatacatactaaaaaaaaaaaattaaaaatcacagcttgttttctgcttaagctatctattatcatcagatttagtcttccaagaacagtagctctgtcaggatatcattttacagataagcagggtctgatcttggctttatcataaaattgatcacttctaaattttagtttatccttttaatagtggctgaagtaatgatatgcaaagctgaaagtaaaagtatctttttttcctttttatgttttttaagacaggatctcattatataacccagactggtcttgaacttgtgatctccttgccttaggcttcctaatgctgacattgtaggcctggtcctccatttcctgtttcaaagactttttaaataaatgtctgttgttgatgtggaataaagtatcaaacagtattatgtggtccagaaaccatctgtcttggtagaaagaaactcagttactggaatgtaaggaatttgcccagggaagtagttaatacttttctgtctatacttccgtgagctatactacaagcgaatagtcccatgtcccccacacaggaaacactgcaagtggattcattggttacagacagccttaaggtttttgttggatttggtttcttatctgagctgtggatgaaggagaactagatcctgggtaggctgagatcagactccttgacttgtcagagcctgactgcagggaccccatcctcctgaagctgggctctgaaaactgtcctttggagatgaatcattatgttacatgtttttcttgcagtcctgtgggaagcaaggcagtagcctctggagataaagccaaagctagtgcagagaaaagagggaggggccggactctggccatttcctcattaggatctggtttccttttcaacctacttgtttctgagtcttgcttcatcacatctgtccattccttcacagccaacaccctttttaattagggttgggagcataatgagactgaggagaacatttgagctccatatttgattttatggttactatgacctacttctgttggatccttaaagtgttcaaagagagctacatgtaactttttgttttcctccagctccactgcataagatgaatagggataagaaaactgttcctttctgaaggtccagagaaagcaaacacattgcttaaaactatgcaatcaccagttaggacctggattggaatccaggtttctggagtctagaatcacacagtttgtctcttccctgcccccactagagctggttacctttatttatttattcttaatttactacactagcttttgtttttctcatgttttaagagctttagcaagtactattttcttctttctactgttttacttaaaaccttcctgagtgtctggatcttaactaaagctgtccctgactctgctattctccatgttttattgttaccatggacacgatcctgctaaggatttattatatataagccataggcaagatgttgtagacccttccactgcatttactttttgttagatgtcctgggagaagagttctgtttggttatcaattgggaagtagttgattgttttcagtcttctgccagttgcaaatatttcagtgctgtgtctagaagtatagttcttatgtcggactgcctatagccaagaatgacatatggtaattttagaagaatacatatatctaggccccactgagagaagatgcaaacacttatatttcctaaaattacagtgactgggggtacagttcactggtagtgtaagtattgtccacggggcctctgactcagtccctagtgacaaaaaaaacaaagcaaagaagactttcattgtaggtctactccacagcagtgttgaggggtggggctaaattaactcttgaatagcacatccagtctcctttaagatgtcactatatggatccctagagacttgggatatcatgtcaaattctagacatcttggactgtggaccatccatcctctgaaacggtgcttcccagtctttgtcacatcatgagatgtatagaaataccagacttagcatccttatacctataaaaatgggtattatttataggtcatcttgggtaaatgaagagtctactcttgttggacaattgagggtcttttgaaatcctgggttcccaggaaggagccagtgattatcagcctgtcttcaatccatcccaggcctatcaactgggaagctctgttctagagagcttggagctctagattaaaatcacctaaaactggctaggagtaaataaagtcattcccgaaggaggctggaggatggctgcccaagaaagctattgaggcggcgaaatctatatcttttcaagcaagatcaaagctagaagtctgagctggaaatggagagtctggcattttctggtggaaaattcggattttgaaacttgaatgtctagtattttagaattttgtgtatatagttaagtgggcttgttagaattgtacaaaaaaagtgctggagatatggtacagtggttaagagcactggctgcttttccaaaggtcctgagttcatttcccagcaaccacatggtggctcacaaccatctgtaatgagatctggtgctctcttctggcatacatgcatatataataaatatataaaacttaaaaaaaagattttgggggaaaaaaagtgaaaattgcagagcctttccagcatctaataaaaagcgctataaaggccagcaagatgactcaaacggtaaaagtgcttgctatacaatcctaatgacctaagttcaaacttaaaaaaaaaaaaaattcagaaagacttctaatgagtcctcttgggcttctgctctacttttccccattcaaatggagctggggtagttcagctcttcaagtgtagacgtggcagtgtttatcctaatattttgtgacgtctttagagataaaagatctgcagaagctggatgtggtggccttgaatcacagcactcagaagcagaggcaggaggatcactgcaaattcaaggccagcctggtctacacagtcagttcaggtcagccagggttacatagtgagaccctgtttaaagagaaaaatctgcagagttaacaactgtgggagctttaatttgacccattctgtcccgacagcttctattagtggggatacaggggttctccacgtagtggagagagaagaggacctgcagtgggtgttgacagatggccccaaccccccttacatggttctactggagggcaagctctttaacaggtaagagcttcatgtgtcttcctgagactgtgtctagagaaagaaaaatttggtccttgtactgatgaatggaaactcccatcgctctagtctggtatgggatagaaagcagggtttatattatataaatataatatatattatattatataaaggaatcatcctattgatctcaaaattagaccttagggggagaaggaacagtgtccaaaatcacttagggacaaggtaaaggagatcctgaactcagggtggaccatagtccagactcagaagttaagccccaaaagagaagtgagttggtggttctgagtccctaactccagttgtttccatcctgagtactaatctgtctgatgccttcctgtcttctttcgtggccttctctgttgcagggctgtgatggaaaagctgaaggggagaacaagcagaattgctggtcttgcagtgactctagccaagcccaactcaacttcaagcttctctcctagtgtgcagtgcccaaatgatgggttcggtaagagcctcaaaagatcacgaaactcttctattatacaaagctggttgttgtacccatgtcaggttttaggggcagagccataggtctgtgtgggccgtgcacaactgacccctccccagtcccttccctccacccccaccccacttcatcgtctttccctcgtcctctgccgtcattcctttttgtcacatgctcagatgcctactctgccagcctagggttccctgatacctgtatctattctagtggggctgatgatagattcatgattgcctctttttgtacttgtagccctatggtatcctaaccttctctggtccctaaatacttggtatctcaataaactgttccctacaccccttcctgcttccttccttcaggtatttactccaactcctatgggtcagagtttgctcactgcaaacagacattgtggaatgaactgggcaatggcttggcttatgaagactttagttttcccatctttcttcttgaagatgagaacgagaccaaggtcatcaagcaggtactgactctgccagcttctagcagtcccagggagaaagaggattattttcatgttcctgtcctgtttggagggaagcttgttctgctagtgtacaccttgaaagatggctcctgaaaacaaccagggagtttgatcaagccatgcccgagtcccagcattcaagaggcagatacaaagcgagttctagaccaaccagggctacatagtaagctcttgtctcacaaacagagcaagaagtgaaaagtttagtgtcttgacacttccctctacctttttttccctgtctgatattatagcaatgaaaggttttagactgggcagaaatccatggaagaagaatatgaagcaaggtgttcagccgtgattaagaaccagataaaaagctggcaatggtggcacatgcctttaatccctgcactcgggaggcagaggcaggcagctctcttgaggtcaaagccagcctggtctacagaaggagttcaaggacagccagggctacacagagaaaccctgcctcagaataaaacaaaaccaaaaccaaaagagccacataaaaagaacactggaatcaggcatgatgcctcatgcttaatcccaggcacaggcaagaataggccagcctggccaacgcggtgagaccttgtctgataaagatcaaaacaaaaacagggagcattgaactaggatttgagaggttgagttcagtaaatccctgaggcgcactctctctctgtctctctctctgtctgtgatatgtatgtatgcacatgtgtttacatgaggacataatgtaaaggccagaggaggacatcagatatcctgttctctcattctccacctgactcccttgagacaggaaacctgaacctaggctggcagccagcaagcacctgcagtcctcttgtcttttctcccaacatcactggggttacaggtgctcagccatgtctagctttttacatgggtcctaggattggaacatagctcttcatgtttgcacagcaaacactcttatctcagatcagttttccctccctccctccctccctcctcctccctcctccctccctccttccttccttcctttcttcctttttttttttttgagacagggtttctctgtgtagtcctggctgtcctggaactcactctgtagaccaggctggcctcaaactcatagagattcacctgcttctgcctgccaagtgctgggattaaaggcgtgcgccactaccacccagccagatcagttgtttacaggtctaatatatcctggttctgtctagtgtggtgtcttcattctaagataagagaagctaagagatttgtctttacaataacaaaatgagttgctggtcaagctgctgtgaatttttattctttatttctagccagtgctcctaatttcaggtcactctgaacagtggctgaagccaggcacagtagcacacacctgtactgtcattgcttgggaagctgaaagaggattatgagtttggggcctttgtaaactgtgtagcaagacccagtgatgactgaagcttggaccacacctgttagaattggataagtttgtctgctccagccaatctgttgagtccatgctatttgtactgattgaggaatttttttctttgaccttatatggttatcccaggacacctgtagcttggggacttatgtctcccaaaagggagtggcttaagaatggagctgggccttccccttcctggaaagcgagagaggacctccacagctagctgtctcagtggggtccatctcctctccagtgctatcaagatcacaatctggctcagaacggctctgcaccaagattcccactgtgtgccatgcagctcttctcacacatgcatgccgtcatcagcaccgccacctgcatgcggcgcagcttcatccagagcaccttcagcatcaacccaggtaggcagagccacgtcgagcaggtggactgtggtgaaggtggtggacccagccagggagggaagaacgggcccaggcagcaggcactggatgggagaatcccgaggagaagaggcagggagccagagctgttgaaggtggagaaaacggtctctggagtttgcgaggcctgggtctaaacagccttgaaggccgtctctatcctaccctctcccttagtcctgtgatctctcattgtttggtgtcctactcagaaatcgtctgtgaccccttatccgactacaacgtatggagcatgctgaagcctataaatacatctggggcattagaacccgatgacagggttgtggttgctgccacccgggtgagtgttgcccctgtgcagcatgggcagggctctctggatgtatctgattttagagtgaacacattggggagccttaagtggagagggagctgggctgttggactccgtggtcctagtacttgctccaaagagaaggagcttggcttggctctaatggtccagttttaaagtacagcaccctatcttgttttctgctatttcagctggatagccggtcctttttctggaatgtggccccaggggcagaaagtgctgtagcctcctatgtcactcagctggctgcagctgaagctttgcacaaggcatccgatgtggccaccctaccccgcaatgtgatgtttgtcttcttccagggggtaagggcttcttccctggggcaggatgacaaggaggaaggggatggtaacggtgggagaggaattgctgacctgagctgttagtcagagtttctgcatatgtctctctgttttagggagcttatatttcctgaattgatgtgtcgctttccttctcccattaacaaaatctgtttgaggcttcctttcatgtttactgtcccaatccctgtggtgcttcagcctggcttaagtgtaaggtaacagcagccagagctgtggggataggggtgagtcaagaagcaactgtgtaacagctggtgtttgctttgagcctttacaaaggctgctttccccacatctaggctcaaaaaaaccccatgatgcatacatgtgagagacaactgggaagatatggggggtggtagatcacatggctgtaagatgactatcggctgagatgacccaagatagcaacccgctctgttgacctcagactgccctatcccttgggaatctctcctatctccacccctcaggaaacttttgactacattggcagctcaaggatggtctatgacatggagaacggcaagtttcctgtgcggctagagaacattgactcatttgtggagctgggacaggtgtgagcctctaccctccacctctttcttgaacttaaacaccttgctctgcagacactacccatcccctgacaagggtcacagcaggagacagatcagacatgttgctctttatccttcccaggtggccttaagaacttcactagatctctggatgcacacagatcccatgtctcagaaaaatgaatctgtgaagaaccaggtaacccaacagataagagaaaggataaaattaattgttgactaaagatgaacaccactgctttgtgaaaagcatcataaacacagtggtatctcattggattcctggaataggtagttctctctgatcattcagctcctaaatactgctgacaggtgagtgacttcttctttttcttcttcttcttcttcttcttcttcttcttcttcttcttcttcttcttcttcttcttcttcttcttcttctccttctccttcttcttcttctttgcttccctttcttcctttctttttttgtttctgtttttgtttctttttcaagacagggtttctctgtgtggccctggctgtctgtcctaaaactcactttgtagaccaggttgcccttaaactcagatttgtctgcctctgcctcccaagtgctgggattaaaggtgtacacctgccacctggtgtgacttgctcctcctgttctattcttgctgtctcacggacccagttgtcaaggctgtcggccagagtctggcctgcatcaggctcctgcccatattgccctccactttattggggcgggggattggacatagattaattttatatgtatgcgtatttgcctgtataaatatgccatatgtgtgtgtgtgctcaaggaggtcgggcagagcccctaggattggaattacagatgattatgaaccaccatcttggtactgatggtgtactgggtcctctgcaaaagcaacgagtgctcttaaccactgagccgtcgctcttgcctctgccctcctctttgttcatgcttactcgtggcccttactccctgccaagtgcagccatgtgcctgcttttctcttgttgccgctccagccttttctgtcccccgctctgaactcccgcagcgcctacagaattatgtatttggcgtttttgttgttgattggctccctccacttctgcacgacaaatgacacatgaaatatccactgaggataaggcagagtcccgaggatagaacttacctataaatgtaaaaaaaaataaaataaaacaggcctctttgtgctctaatttcctaactgtagaaagaaccatgggaactataggaaattcagttttgattccagagcgtttgaagaatatatctacgagagcgtaggctcccactccctccacgttcccagcagtctgcttctgttccttcctcaggtggaggaccttctggtcactctggagaagagtggtgctggtgtccctgaagttgtcctcaggagacagaatcagtcacaggcccttccaccatcatctctacaacgatttcttcgggctcgaaacatctctggtgtggtactggctgaccactctggttccttccataaccggtaagtcactgggccctgcaccttctttgttttcagaggcactctagtctgaagtctgggaggaagattgctgtcttctcccaccctatacacttcctccaaaaactctaggaagtttggattcttcaccgagtaacctattcacaggaggcctggacctggtccttaacccttagcactcctagtgctatatccttagctatggctgcacttttcccaggctttcctggcatctgagttcccaagggcatcatctcaagctaaagcatggaaagttaaaatgggcttccttaggtggaggacaagagtggtcctgtttggggtccacaagcagtgttcttactctgaaatgtaacatgttgttaggtgcctgtggcttagtgcaccaggggactctgaagataagaaggcaccatattacctctcttggttctcatgatgctcctaacttgaggccagggataacgggattctcactcaggctaaatggctctaactctagcctcactagaatcaaataaggttttaaataaaagtgtttaaactttgattctctgatctgagcaaagatcctttcttactcacagggggtgacagatctagattactatcagcttttcaaatctctctcttctctttctttctttcttcctctctttctttctttctttctttctttctttctttctttctttcttttgtgtgtatggtatggtgtggtgtgtgtgtgtgtggtactttggggtaagaaataattcacttgattatgtggctgtcttggctctgcatagggcagcaatttattcctgcataacaggcatttgagtaggaaggctaagggtgctctttaaaatttgtttccttgggcctggcattggtggcgcacgcctttattcccagcactcgggaggcgaggcaggcagatctctgtgagttcgaggccagcctggtctacagagtgagtgccaggatacacagagaaaccccatctcgaaaaacaaacaaaaaacaaacaaacaaaaaatttgtttccttggagctcacagggatcatcacagtgatctgatccaaagtgtgtgtctgtaagcgtctctgatcttagctagcaccaacagcttgccctctgtcactgtgagcattcgtggaaacactcatacagggcagtagttctctgaaaagctaaccagcctcctgtgtgtccagtgcttagggctggcttattttttatactttgtctagcagcagaggattcaaattggtttacctcactgtcattcctacttccccatttctaatatctctttaatagtggagcctaattttctctctcatttcctactggatgatgaaacctaagacagcaagttcccacataaggacattttgataggaaagggcccaggacctggcttcatatagccagggctcatactgacttttctggcaggtattaccagagcatttatgacactgctgagaacattaacgtgacctatcctgagcggcagagcccagaagaggatctgaactttgtgacagacactgcgaaggtagtactgacctggactgggtgggagcatgggaaatacaacagaaatggtacaagtgaacctctgcgagacaggtgagccatccagcccttctcctcacctgctgcaggcactggcgaatgtggccacagtgctggcacgagcattgtatgagcttgcaggaggaaccaacttcagtgactcgattcaggctgatccccaaacagtaagaaaagatgggcccctagtcctgtctgtttctgttaacacaggccactccccttctctatggtccttgccagctttctaaactttggagtttagcatgtctgttcatgcctacaaggatgattccctcaagagttcttgagtaggcttcatctacatccttgtgaattggccactgtctcccagcccaggtataactgatctctgctcattgtttctctggtcttgctgcaagtcacatcatttttttttttttttttcttctctgtgttccaatcctaggttacacgtctgctctatgggttcctggttagagccaacaactcatggtttcagtctatcctcagacaggacctaaggtcctatttgggtaagcatctgctgtgagaaggggggaatccctgcatgacaaaatatagggagaaaggcatcatttttactttaatctttactctttttttcccctctcttctttttttctcctggttttcctttctttttcttggtgtttattgggcccttttctcttaaccttctctcttctggctcctgccaattctgggttctttctggttctgcccaccttgacctcaccttcaaaatcctcgtttccctttggcctgcaatcagatgatggacctcttcaacattacatcgctgtcaccagccctaccaacacgacttacgttgtacagtatgccttggcaaacctgactggcaaggtgaccaacctcacccgagagcagtgccaggatccaagtaaagtcccaaatgagagcaaggctgtgagtggcagtggggtgtgggaggtgccctggggcctctttcccttgggagagctgggaatctgcagggcagatgtggggactggcaaggaaaggctgagggatagggtcctgtgaacctgtgtgctgaggaagcggtagcctgagtgaaattgggccacctgtggggtgaagttggctggaatttggtgctaacagggacacgggtagcaagtgagaagaatgtcccctcagcccgccttctcctgcagctgtatgattactcatgggtacaaggccctttgaattccaacaagacagagcggctccctcggtgtgtgcgctccacagtacggctggccagggccttgtcccctgcctttgaactgagtcagtggggctccacagagtattctacatgggccgagagccgctggaaagacatccaagctcggatattcctagttgccagcaaagaacttgaggtgagactggactggagggaggtggcagagttccgttggggtcttttctctacctcttgtctcagttctgttaggttcctttctgctgtttctcatttgccccagatttacagcaaaaccagtgccaccctgtgcctgatctgcattgctacccattaggaggcctctctgtgctgatagttggaatgcgtacctatttaggaaagtcttgtttgggtctaagaaggtcttctgtacctcccactcttgcctagcatttactttatagcacagctgggcggagtcagtagaatagttattgagcccctgttataagtaagtcatgagcataagtataatgccagaggaccaaagtcttaggtcctacctaccttcacttcacttaaacaaagaacacaactgggcggtggtggctcacgcctttaatcccagcactcgggaggcagaggcaggtggatctctgtgagttcgagaccagcctggtctacaagagcgagttccaggacaacctccaaagccacagagaaaccctgtctcagaaaaaaaaaaaaacaaaaaaacatagacaggtgctctgttcacctaaggtgagcccagtctgctcattgggaggatgctgcccgtggttgttccctgctcttggtacttgagtctactgccagaattctcgtgttgtttcctcctgagttcccttagactgtggcatctgagaactcttttctctcccgctcacgccttcacccttgcagtttatcaccctgaccgtgggcttcggcatcctcatcttctctctcatcgtcacttactgcatcaatgccaaagccgatgtccttttcgttgctccccgagagccaggagccgtgtcttactgaagaggactccagctctccctgccagctttggacttcatttcctagatcagttgttccactaggaacaaagcactaattttcactggactgtctctgggtctgtcttagactgggattgacacatggatgactgtgaggggagacagggagaggtggacagctgcctccccttccccgcttccctttcctatgtgttcctccttctctaataccaggaattacgataaaagcttcctgctcctgttttaactccccagttgcccaccctcatctgccttttcttgggatacctcttatctttgcatcctgtacctctctctgatcccactgtcaccctaccctcacccccgtacccagccacctgctggaccaggaagaacgatgtgaaggattgagcatcagggtcaaaccacccgcccgaacccttggagagaagaatgggttctctctggctgagccagctgtgtctttctcactgtcatttccccgggtccccagatgacatgttaaggtgggcatgctgttaggtgggtatcccacctctagcccacagtgctcagttgtactttttattattaaactgtaatatctatttttgttggggtttttttcttttatctttttcttttttttgtaaatatataaatagcaaatttcattaaaattatcccatacaatttgtacttgttgctttgtattcttcccaggtcaccatgttcagtgaccctgggctggaacacagtgtgtgctgccttgctcaccagaagtaagatactgttaaaactcaggagaagtgaagaagggctctgacagccccagagcccctcttagaagactattagcagtttctactcattcactctgagcaggtacagagttgaagaagatgcaacccttagcctggaggagctcagggttggagtgagagacacggcagactcacacccgggtgtaatatttagtgtagcaaacagagccttgtgatttgctgcagatgggatgggatgccgggcagaagaagtgactgggtcagggttgagactccaccaccagcaaaggtatgcgattgggaagtggtaagagcactcagtgtgcctgaaccatgaggagaagcagtgggtgaggctggggccacaccagaaggttcttggatgtccctccagtagtggtgggctttttgtagctcaacacaagagtcatttggggactgcttcagaaagaacctgagctcatggagacaaaactccccgagtcctcatggaggccaaattgtagagcagagcagagctgcaagtgatcgtgggccgtggctgagtcagccgagggtgggagaagggagccagcaggggtgggagcctaagtgggctttctgtccttgttgctggccagaaggctattgctcacacatacctaaagacccgcggagatggaaaactggttgtcttcacagttcagacactgttcttggttgagctgtttacctttttgagaatcctgtagagaggagatgatttttctccaggtttctctccaggctccctggaggaggcatgtttagggttctgagataggaaatataccctgctgcccccctgccagcccccagttggagctggataagctgtgcgctgtgctggcgctggtgggagctgagcacagctgccgccatcggctgggccggctccatgcctcacttggccaacaggtctcccagcggacagagcagtaaactccctcatcctgctggcagcttcaggaagcggggacatggctgagtaccagagagggggctaaacagagaagcgaaacagaggcttgggcagagtcaagggattgggatgtgtgaaaaagaagaggaaaagatgcttcctgttgtagggaggaatacagagtctcatctgtgtctccccagtgctgtcttggcccgtgttgcaccactccctatacatcagcccctgccccccatgccaacaacagtagaacccagttccccatggtctttgcagaggccacgctccatggagggagcatagcttctgagactgaccttcagggactcccagacactctccctctctcagagcagtgtggtggccccacaagaggtacctttgtgcccctgaagaccagctggcctgcaacatcttagggccacagtactttgtaatcccttagttttcctttgttcccctagacaggcccgtgccttctgcaatgtgtcattttctagcccctctcccttcccaagggcctctctcttgccctactcttgtcagttcatatcggcccttctcttccagcccaggtagaatgttgaatgaatgaccccctatgccttgataccaggctgagtaccctctgtgacacagtatcaggaggcttcctccagctggtgtcttcaccagtctatttgaataaacgggattactgctttctcttttaatgtcgtggttgctgcccaaaggtacgttctaggaagaggtatttacgtgtgtgtgtgtgtgtgtgtgtgtgtgtgtctgtctgtgtgtctgtgtgtctgtgtgtctgtgtgtctgtgtgtgtgtgtgtctctgtgtgtgtctgtgtgccataggatgtgtggtcagaggacaactttggggagtcagttctttcctatcttgagacccaggaatcaaagggttgtcaggcttacatggcaagcacttttatttgctaagtcatctctttggtccaagatttttttttttttaatctgtattctggtgctctgtaccttactcaatagaactttgtgcctttgagggaaattaattaattttgaggtagggtttcactatgtagtcccagttagcctggcacttgctgacttcaaactcacagagatcctcctgcctctgccctttgagtggtagaatttaaggagtgtgccacagccaacctttttttttttttactcttcttttaaaaattcatttatttgtattttatgtacattggtgttttgcctgccctggaacaggagttacaggcagttgtgagctactgtgtgggtgctgggaattgaaccctggtcctctggaagagcagacagtgctcttaactgcggagacacctctccagccctgccctcttttctttcaagttagcatacaaaactgtgagtttttgttatggcattttcatacacatgtgtcatcttcctcttccccactgctttttcccatactctctacatccagagacttacaatttctaagaccttagaaattgtgtgcattttttttctgagacagagtctttctgggaagccaggttagcctcagactcccttactcctgcctcattatcttgactgctggaaatacaggcatgtgccaccatgtccagaggctctctcatttgatttgataaatgggggaatctagcctggaggagtgatgctgcttacataggaacatccaataaaggagagactgaggtgagacaagaacatgtcttctgccaacagccgtagcagtactaagcatttactgagcatgactacaggggaagccctttgttcctgcaaggtaaaagcataagacacacatacagtatcttttctttaagatcccaaagtttagatggagagaaggaatgtggcacaagctaacccagcaaagctgtgtatgctccatactagatcagacttagccaggttctacccaagttcagaggacagcaggatgcttcaggcaaaggtcagtgaagaggagtctcgtgtggtgggaagagctcaggaccagagtttttggtgcttgtgtgacactgggagggatattgcccctctctgggctccagtgttctctctagagtgtagtctttgacaatgggctgctctctcacactggctgtctggtcctgtgaaggagcaaccagagttctagcctcctctttcttttccctaagttcctccaggaaaggaccacttcaaaaaaaataatcaactcatcaactctcaagatagcacaaggatcaactctagaaagggacactattgtccctagcccaggaacagtagagatttgataaatatgacatcatttcctcaaaagaaataaagaggaaaaggaaggaaggagggaaggtgagagaaggaggagggagggaggaagatggaaggaaggaaggagaaaaggaaggacaaaaaagaaatagaagaaaagactgcaataataagaaataaaaaaaaaaaaactgggcagtggtggcgcacgcctttaatcccagcactcgagagacagaggcaggcagatctctgtgagtttgaggccagcctggtctacagagagttccaggagcatccagggctgtaacacagagaaaccctgtctcaaaaagccaaaaagaaaagaaaagacaagtgctggagaatcagaagtgcttgggaggccaggggtcccagtgggcttctggataaatttttatttttcatgaattcagacttaacaaggtatggcggcctcacactcgtgtggtgcagaagggcagtgtaagccctgagcccaaatggaaacatggagcaagagtggagggtcatctcagggggcctaggagaagtcattcaccgagatgatgcaactgtgagccaatattaccatcctctgtcccaactaagtggttgctcagggcttaggggctgggaccctggagtcctcactcttcccccaacccacaagtcagatactagaggagtagaactaaaaccagaagtaagaggggacagcctgaaaaaaacaagatagtgaaagggaacagaggaagttgggtccccagcagggctggaggaggaggggtgggagagggaactgagcccaaggggagaaaggccaggcgggtgtggccaggaggggagtagacccagtgctggtggtgacagatgggacaacacaaagaggagagcttcagggaagacagatgggtgggggagggaagggaggggcatgggggttggggggtgcagtggttggaggctgaggctgtaatgagattggagatgggctctgaggtgagtgaagagaaaggaagaaaggagaggccgccttgagagacaaaggcgataaggcctagggggccaggggcagagggcttgggctgggtgctgagaaggggggcttccagctgggctggcagcgcagagagtgacagattgtgtagttagccagagtggagacccgctgtcaccttctagaggcacagagaggtagagacagaaagacagactgacagagaccatgtggaaaccaagatgaagacacattaactcacagctgccatttctaagtgacagtagctcctgctcaggcttctcctgcctgccttggcccctgtgacccaacatacacacctccagcagctgacacaataacacctcaaccccagccactcgcagagaagggtcaggcagtgcggcacagcaagagttaacactgtctgctctccctgccagccatttgcctggttgggtccccagggctccccacatatgtcaccccctctcctgccaagcccactgcttcccagcttctctaggccctcccctcaccctcaaggactagccctagcccctgtgtctgacctactccccaaacctctccccctcagaacctcacagtctgcctaaggatagaaagaaatttgtgatccataatctgaaaaagtaaatacctataaaatgcaaaataacaataaaccacataggcataatcattttctctatccccaaggcctgctcctctcatcttccttgcagggaagacagcccctacgcaaaacacacacacacacacacacacagctctcaacgtggagagttcacctcggatttcaacatggagagttcacctcagattccctcagtcatgttgccttacatacacgtgtgactgaaacttcctgtatccttttaaccaccttgcatttacagagatggggtgaacactctacagttcactcagcagtctcccacgaactgtttcactgggtgttgcaacagccctacagagaaggcaacattatgcccatattatagatggtgaagagaatccagggaaggttacatgacttgtccaaggtcgcaaggacctggaccgaggtccagcagactccaggttagtagatatactgctgttgatggctctgtgctattagtgcctctttattagctgcctgctgccctaagaggtaaaacctgaattcctgagtgaggcctgggactggggatccccagagcctaagatcttgggatgacagatgcagtggaggaagaagtagtccccagagcatgtgggacagctagggcagaatgcttcagggacagggcttgcagggctgaaagtatctgagctaaatagcctgcaggggagaggctggcaacaggagtctggctccctcctccagtgtccacccccccccatcagtcctttctgcttggtagtctctctgcatctgtgctcctcagcaccttccttaccctttggggtctggggtccccgttttggtgacaccttaatacttgattattgtgtctctctagcttttcactcatagtttttctcttcctgacaactgtccgctctctgctctctccgtgtctataccccctctgccccacagcttctctcagactttctattagcatttccccatccctgagtatggccctccacacctgaatctccctgtcagtctcttgtcaggtttcttccccgagtttctctctctctccttgcatctccacgtcctggccccaccctcctcctctgcctgtctgtctcccctatgtctctgtcatcttgtggtgacatccttctttttctccgtgtctcctccatgtctcagcatctcttctcgtcatcattgtcctctgcctctccctatcttctcccatctctcccatggcactttctcccgtgtctcagtctcccaatttcttggatgggttggagggcaggagggtggggaaacaggactgtggttgctgggggctcattaggtagagattggtttttaatcagcaccatggtaatgatgatgcaagaaccaagccgccacctgatcccctgccccccccaccctctcctcaggccctctttcccctccagctcagcccatctgctggcgcctgggcacctgtctgggcctgcccaggtgggagttggcacctcccagacctgggggtggggagaggagagtgagcttggggaggaattataggattccctatagggaaggcctcaccctggagaaagcccagaaaaggttgagaaggtacagtgaagtggcaaatccctcccacagcctgggctcctactagggtctatgcttactacaagcattacctcacttgatctccatggcaacctaaacagttttaatttaccctgttttaaagaaaaaacaaaaaacaaactgaggctcaaaggtcattgctcgtccaaggtcatacagctaacagtgccccttttgctgtagctcactgtgtctagagtctctccagtcatggtttgtttctgacactgaggctcaaaggaaacgtcctccagctgaaagcatgggagcgtttccatcctgaaacccagcccactgcttctctgtgcttcccttggccccagaaacttgctcccctctcaggccaccctgcaacgcacccacacagacacaaacacacacatatgcacgggcacagaccctggaggcggctgagctgtcgatgtgaacgtaatcggtgctcatttgcacatgattttgtatctcctttccttgatgctcatttgatggcctgcacactcaggcagcctggactgccctgccctcctctcctccagtccttccaatctctgttctgcctctcttggatctcctccgtcctctcctattagctcttaccactttcttcccaagctcccgattctccgtggatcagcttgggcttgccagtctagaaaaacttcctatgggggtgagggattctctatctagaacctgacccgactcctggactgttgatggggtaggtgggagaaaggggtctggaaaagagactgtcagggtgcttgcgacccaggatgtcaagggctaggacctgaccagcatgttaagctatgaatactgtctgtatgagagcttacttagggggaggacttttgggtcctcttccacattttagtgctggtgtcttagtctgttcatagtttcgctgttagtgctagggagagccgtcttcccaggggtagggagatatgaagaaggggcagtcaaagtcactctgggactcagaatggaactattttaaatccagcttctttggaggctctgccctgctacctctagtgtggagaccgagggggttcatctgtggtcttgccctggctttcgccccagccccaccccttccccagctctctatttcttgcttatgaaatatgcatggagaacagatgtccctgctcccccactccccgccccctcagggccagcccccgcccccagctcccaaggggttcccagatccctctgccaatggctgcctggcctggctgtttaatattgatgagggggctgcctgggccagccaatggagagctgggggtgtgtgtgtatctccatatatatataaacacataaggctggaccagttcaggtgtgtatgtgcctgtgtgtatgagtgtgcatttgagtgtgagtgtgagtgtgggtgactccagtgcttgactaggatcaccccttctgcctaggccctatatttccaccatgtgtccccccctcatccgtcccggagcctgttaagtcacgacaagctgtccctaagagctctagaaactggttactaactttgcagacagatgacccttgagcagcccgaagagactggagctctccacactgcccccctcgctcacccacttggatcctttggcagagtccttctaggtaagggggaaccttgggctggggaagtgtgggcatgccgctcccagtctctggctagagtcccctcctggaaccttccccctgctgggtctctctcaacctctgcctctctctctccccacgtctcttggattctttgggcaacctcagtcagctgctgttggagaaagtaggatgggaacccctgttttggatgcttggaattgttgcttccctgctccttggagcctgacgcttggagaccggacatggaggaaagagttgatgggaaaacagaagctgctgctgggagtggaggtgggaagaagggaggggcaggtggagatgggtcgtgacagatggggagcagggagggagagcatcggagagtgatggagggtgcagggacatgggtattggacagagaggggttccagttgtgatagaagtaccaggaacccaaggctgaactcttggttccagtccgccttggagtggggaattagggacaccacatgtactgggggatgctctcccaccaccccacactatttctctcctctcctctttctttggtccctaggatatataggatgttcatagtgttcatagttacagctttaatcagcttctgtttcatgttgtggttggtatgtaggtgtctctccaccattagctgcggtggtcttgtgtcccctcgccccctgcaagagcttagtaacagctctggtctcaaacctgtcttctgtgtggtgggatgggggtgagcctcggagaaagggtgtgtccctcgagactgtcagatggagagccagggctggagacgaaggggatggtgactgggaaggagccacaatactctgtttctgttaaagcttgagctcactgcaaaagacccgtgattctgggacaagcaaacttagctggcctccataagggtagctcccagaaacttcctaggtctcctttgcaggccatggcacaggctgtgggtgagtttcccacagtcttccttgcagaatttccaagaggccatggaatggcaagggctaaatgtgtgaaggagcaagctggggagcctggtggtcccaagcagcagtgtgtgctgacagggaatgttttctttggttctaatgggcagggtggtagacctaatgtctactgtggtgatgttgtgccaagccccatatatcccaatccactcaacaatgtccagtctctgtgtttgcatcccctccccctgcaagaagcaagggggcagaaggttccaaagccaaggcttgcagtcctccccctactattgggaaagggctagagtttccgacaacttcccttggggctattactccgcctttccccttgtttattattatatgcccccccccacaaaaaaacacatagcaaaaaatgtgctatcacaaaagatgagggtagagcctgagagtgtgaaactgatctctagaacgttttcatcttgtgaatgtgaaattctatgttccttataaaacagctcttctttgcctctccctccagcccctggcaaccaccactccactttctgtttctatgagttaggctactttagaaacttaagcgagtgcagtcataggacttgtctttttgtgagttcttacttcactagtataatgtcctcaagggttagttgaccttgcagtacaacagggatcccccttcctattcatagctcatggtctattatgtatacattgtatttttgttctgttcatccactcctccactggagaacatttgagttgcttctgccactgctaggagcatgggtgtgccaatatctcatgaatgctaaaacatagtgtatttccagtttcatttttttttttctgacggacatctaagctgttttccatagcagccgtgccactttacaagcgtccttcttcacattcttaccaacactgatctacttttagtttgtttgtattttgtttttgtttttttctctctagtggatgtgaggtgatgtttctctgtggttttaatttgcatttttagtgatcagtgatgtgccatgtactttcataagcatgttatgaaatggccatgtgtgcattatctttgaagaaatgtctgtcaagtccttttcccacttgaaaattaggttatgccatattttggttgttccagactttcctcttttgagattatcactatgtatcaagtctcaaatccacaatcctccttcctcagtcttccgagtgctgtggtgcaccggcattcgctgccacacctggctaagaacttgtttatatactgtggatacgaacttattatcaggtatatgcatggtacaggactgtttccttataacataggttgtggtaattgttctccttaggttaagtttggcttattgttgttgttgttttgcttatgcttctgttctcatattcaagaaatgactgccaagtccagtgtctcgaaagatttcccctctgttttcttctaggaattcagtggttttaggtcttcagttctctcgttcagtgttaacatgcctgctgtgtctttcctagtactttctcttttctctgtttttcctcccactcctttccacctgctggtctcgctagcttccggacagccctgacactcaactcttctcccagccctgagctgcccaccacttcagcggtcaattcttaattctccttctctgtttcaggctcccggctggaaccctgaccatggaaccttaaagtgactgctttcctgagctcagtggcccggcccggcactccaggcccttcctgcctctcccacagcccagttttcaagctccgagcgggaggggtggggaggtgatccggttttcattaggccggaggcttccatcatgatgcttaactccgacaccatggagctggacctgcctcccacccactcggagaccgagtcgggctttagcgactgtgggggcgggcccggcccggatggtgctgggtcgggggatactggagtgggccaggcccggagctcggagctcggagagtctggccgcaaagacctgcagcacctgagccgagaggagcgcaggcgccggcgccgcgccacggccaagtaccgcacggcacatgccacgcgggagcgcatccgcgtggaagccttcaatttggccttcgccgagctgcgcaagctgctgcccactctgcccccagacaagaagctctccaagattgagatcctgcgtctggccatctgctatatctcctacctgaatcacgtgctggatgtctgaactcagcccgcctcccgccctggatcctcccctcctcccggggcctctccagagccccctgtcaccacgcattacttagaatggccgtctccttcccatcccagaggaccgggcccacaccgctggtcctgaaggccagtttcttttcattgacctaggcatgtgagggatgttctcatgggttccttcagagagttgttagagcctatctggtcggagctgcttgccacagtggtcagaatggagtccttgctggatttactagtcctaacctcgactcagctgctgcctcttctgccctatgtccaagttttcagagaccccagacccagattctcttctggcaatgatgggacacagcatcagaatccgaacgggaaatggtcaggggcagagtcgggagagggttcctaagtcccagacttctctagccatggctaggggagggatgggctcttcggatacagagaaatgagtgaggtgactcctgagtagccaggggttatagaaaaagtctgcctttcctttgtctatcttgttcctgaggcttagaatatacagacctcagatcttggtcctgagtgccttgccttcttggagctgtctggccactcccctgtctcttcccatgtctgccattccagttttctccctttccctgtgcaggctagaaaaatgaaaacctcagtcttgggatgacaatgatatctccaaacagcccagggcaccttgcagaaggcccaggccctggctgggcatcacagcagcagttgctcccctcccagaccttgagaacatgcaaaccccatcaactcctccgtcagatgcaaggggatgcctgctacttcccgctgtgcatgctctggggccttcttattattttcccccttccttccttaagctgccatggaaaggaaggtgccccacccatgctgctgagccccacctgcccattgtagcctgtgcaacgggagtcgatggccttagaatccctggagaagaaatgaactcacggcttttctgtgctccatccaccctcacaccaaactcctagctctacaaggatatttatttatttatgtatttatttatttattcatttatttatttataaatattactatttatcactgagttatgcactttggggtatggtgagggggactccccacagctagctctagctgggactctcctttctccctgctaacttctttccttttcttgctccttctccagtgcaggtatgtgtggggatcccttcatccaccataccagtgccctttcctcagctccgtctgtctgtccccatcccctttcctctggaatagcgctcctcccccagcctcccgccttctgggcgtcctctcccagtccctcccatcctgacaaccccactccagtcctatccacctccatttcttttatccaccctgctttttccagtaccaccaagagcagaccccaggatctgcgtctggtggcctgtgtgtaagtctctctctggttacattcctaatttcttacaaaaagaaaaattaaagtgacctcgatctagaaccagatgtggctgcggctgctttgtgttgggaagctggcctgaagattgtgtcaggtagatagcatcgaggggcccaggcatcaaagcctctccagagtgtctgcatggtgagagctttgtgtggtaaatacatgaagacagagaaaagaggtcatgcataggcctggggtctcctaccagagaccccacacattccatcttagaattcactgagcgacgctttctgttttcagatccttttcactatggtcttgagagaaggcagctgagcatcccaacagaacccaagttaaacccatatctgtaggtccatgctgctggagaaagccgtgttataaaatcaatgcactgccttttcttttatcatctccaggctaggtcagcattaattgaacctcagctcttggcctgtcctgtgcttcccacggttagatgcaagatagagcacgatggagggcatgatactgagagaatgaggaaagggattttaaaaaaggagtgctgagtggctgggtttgtaaggctaaggcagttgggcagtcactggttcaagcctaggctgaggtaggcagtcatgggttcaaagtctagcctgagatcctgcccaaaaacagcaaagggggaaaaggtgctgaaccggcttcagagggagtctagaaaagaccctaatatcaattgataaagacatttaagcccagagagccttgtccaaggtcacacagctattagggacacagttaagactcagattcgacttcttttgtgtgtgtgtgggggcaagtgggcagattgaagacggggactcatgtagctcaggctgggttaattttatttatttatttagttagttagttagttagtttttttgaaatagggtttctctatagctttggagcctgtcctgaaacttgctctgtagaccaggctggcctggaactcacagagatccacctgcctcccgagtgctgggattaaaggcgtgctccaccaccaccaccaccccgacttgcctttgacttcttaaaactcaatttcttgcaaaccaggctggctttaaacttgacacatagcctaggacaatcttaaatttgagatcttcccacctgctaacctcccaagtgctagaattacagcggtttattgataaatcccagcctctttaaaatgacccaacctgacaggtggcgctcttttgggcacctgacttttaacaggaacactgataaaacagagaggcctattgcatcgttaagaaggtgaaagttctggagatcacactacaaggaaaacagaagatacatttggggcttttgttttgtttttgatttgatgctggggaaaggaccagaggcctcacacattgtaggcaagtgctctactacggggtaggaggaggatgggggcagttaaataaaactgtcttgataaaaggggctagaatatatatatgcacacacatatacacacatactatttgtagtatagttaggggcagttcagttggtaaagtgtatgcctagcatgcacaaaaacctggacttgatccctggcattgcataaaaggggttggctgtgcacctctaaccctggcactccaaggtggaggcagttggatcaaagttattctcagctatagttgaggccaaactgggataggtgagagcctgcctcagaaaacaaagcaagcaaagagtagatttagaggtaaaaccatcctcatcttcaaatactgaatgaagaaacaaaaatgtacattctgtgtgcctcagaagttagaatcatgtccgctgagtacaggctagaggatagtagattttaattccaagaaaaacccctgacaggttttgtagtacctggagctgtccagcctcagggtcacctgccctataaagaggaatccaagcaggggactggagcatctagtctataaagacacctagagcacattctcactccagatggaactctggctagagacggtagaagaggctttcctaacttagagccatgtaagatggctgaacataaacgcagtgggaaggacatactgagatgtcatccagtacttgaagggtgactgtagtgtgagcattaggggtttgtatcagaattggaaagggactgctaagatttagtgtcttctctgtgagttcaatgaaacatcctaacccagagtctggcaagagggtgggttgaactgaggtcagggaaatctgaacactacaaaacagcagtgtggaaggacccggacgatccctcagtccagtccgtgcccccccccccaatccttacctctcttccttttaaattttttgattgtttgtttttcaagacagcatttttctgtgtagccctggctgtactgaaactctctctgtagaccaggctggccttgaactcatagagatccacctgcctctgcctcccaagtgctgggattaaaggtgtgcaccaccatcacttggccctaatttttaatttttttaaaaacttgagaccaagtatcactatacagctcagcctggcctctgacttgccatcctcctgcctcagtctccccagggctagagttacacgggtgcatggccaacacctttgattatttatttatttatttgctcattttgatacaaagccacactaaatagcccaggctggcctttaacttgccaaccacctgtttcagcctccagaaagcttggattacaggtgactatctagaaaagtgatgtgacttactatgacgacagactggaatcataagcaggtcccaggatcctgggtatgcctctgtgctgggggaccacctccgcccctactcccaggctggagagcagagggttaggggcccctcccctcccaggtccctcagggcccgagggtgatgagagagggcggctgcagctgttgtgctgctcactccgaatttctacagataatcaattggcctcggctgccgctctgctctgcatggcaagacagggaaggaggcagcgagtgagggggggaagagagaccaggagatggggaggggcgcagaaaggagcagcgagggagatggcagcccctgggctgagcgaagggaagaaaagtggaagctcaaagctgacaggcagtgagataggacagggctagaacaacacagctcatttcacactgccccagagggcacggtgacgcatgcctggaaccccagcactaggaggcagagacaagtggatgctcccaagttcgaggccagttttggttatacagagagttctgggccaaccagggttacatggcaagaccctatctcaagccaccccccccaaaaaaaccaaaacaaacaaaaaaaccaaaagaaaaaacaaaatgaaatgacaagacaaacaaagcaaaacaaaacaaaacaaacaaacaaacaaaaacccagagccagagccagcagggtgtgagtgaagggggatgtcaggtaagaggtacagtcagttacttgggggatccagacgagggaccatctggacacttcatccctttcttcctcttctaggcctcttggagttgctcatcccctggcgaccacaggccctgatcttctagttttgtctgctatataattgctcccctgccctctatctcagaaagccttaactcagtgacagcagaaggcaagaccccaagggcttcaaatagggtctctaagccagtccttgcacatgcgtgtgcaggtgcgtgtgcgcacgagagagagagagagagagagagagagagagagagagggagagggagagagagggagggagggagggagagagagagattgagagagggagggagagagagagattgagagagggagggagagagagggagagagagagagcgagcgtgcacgagcgcgcacacacactcacacacacacacacacacacacacacacacacgagtgcggtagactggcagacatatggctcctttgtacccacacaatggaggccctgtctgtgcccctttcagcctgggcatagaatgctggtgcttctctctcagctcacccagcccttccttctccgtaccccatggagtgcttgccttgtttgcctcctcttcttttcttctggaaggccccatcctttatctttctgcttctttctaatgccctttcctgtgccttcaaatttgaccaggtatggaaggtgagttaccaagaaagtcgccaccacaggtcattaacccgggaaaagaacatgcaaacccctgtctgtacgattgggggtggggaggaaacagggccaggcagtggcagcactgtacagagggagagaaagcccagcccatacctggcagccagaggactggtggtgacccagttcccttcccttccctccctccctccctcccttcctctttcttcccctcttccctctcctcttccttttagtacttttgagacagagaacttgctgccatcctcctgcctctggcttctgagctctgggattacaggtgtgggccaccacacctgcttcatctttactctacgtgactataaacaaactgcctgttctgctgtcaacttgttcatctgtagagtgggaagataattaagacctgtcagagtgctaggaggattaaacgagattggcataaaagtgctccctatgcctggcagtgagtggtggggcaagtctttaaccccagaactcatgaagtagaggtagatgggtctctgagttcaaggccagcctgatctacagagagagttctaggacagccagagctacacagaaactctgtctcagtaaaagaagagcgagagcgagagagcaagagcgagagagcgagagagcgagcaagagagagagcgagagagagagcgcgcgcgcgagagctctgttccacacatgctcatcaaatgacaccacgggggcagtaaccagcagggtcaacctgcacttctgtatattttgttcactatatgaggtaacaggatacagtggtggaagggtctgacatgcagctcctcttccaccagaccagctatgcattagggagggtgtatccagccttagagaagaggccctggaatcaagcctctttcttataaggttcctgaaaattggttccgagtcaatcctctttggagagttgggaataagaaagctgtgagatatactaaactcagactggagaaatcatagccaaggaagcgggggtggttgaagatctagagcagggtgtcagagaagtctgtaaggacttttttctttggcttctccaattcctttctgcaaaaccttggtcattgcttgttgaacactgccccctgctggccactagtagagctggtcttcagtcttcctcttcctgatggagagaagctgagaaactgagaaagggaagaaactttcagtcttgggacaaagagcagagaaattgctggcgggacatgcaacctgggtttctgttcctgagaaattggggaatgtggggtgttgactaggcatgactagattttgtgttttattacgtctgttcatagattagaatttcaaataattttgtctgtggctgtttcatttggtgtgtgtatgcacctgcaccctgatgcttgtttcttgtgggtgcacgcacacacacacacacaaacacacacacacacacacacacacacacacacacacacacacacacacacacacacccaccccagtggaggtcagaagtgctgagtgccccaaagctagagttacaggtgattatgagcgacctgatgtgggtcctggggatcaaactctggtcctccgaaaaaacagtgtacacgcacgacctctgagccactgtccagtccctccatgcctttcttttatgtaggaacctgggtggcggctgttaggtaggcagcaagaacaaggcgcggtgctcttgtcttgcctggaggccccttctctccctctgtgttttacttcttcctttcagctccatcagccacatggctgtttacatgttgcagtttttggtttctctggttcccgccccggcttcattctgagatcagatctttgctttcctctaacacggagggcttggatcttccaagagaagcaaggggagaggtaagggtccgaggtcacagcctgtctgctagttacctcttttttttttcttcttttatcttccacagcattcaagtccagttttcccttttataatcttagaggattctattccgtacaaggcaacaagtatctactgaaaagccgtgtgtttccagtgctgctgcaggttccagtccaagctcagcacccttcccccgtctatttaggatgggctgtgtgggcatagacacggagacaactaagttatattcgagggatggaagtgatgggaggaagactgatgagggcagggacaggtaaaatctgagtgggttctgagggtcaatggcccctcaggtcagcaaggtgattactgtgaccgctgtagcatgccgccaagagtcccctttgcagttcccttcttcactggacagaggccctctcttcccaggtgtgggagggctgactcacaggtgagtctctctccaggacatgccttgggaggaagaaggctctctctccgggggcgtctgcaagcaatgactggttggtacggccgtcctgtgcctgagagtccttgtgggagtaccagaggcctctgttgcaatcctgagattgcctcacactcaacacgttcactcctgggatcacttaaccgtgtacagtgtcagagtcaaagagccctgttcccaccgtggatacggttcagcgatagaatgctcacttatgatgtctgtgtgaggccctgtgttcagtctccagcaatgaaaataacaagcagaaaacataaaacacaaccaaaaaagaaaacagccttttttaaaatttttttcagagtgtggaaaatcccactgcttttgaagctaaaaacccacatccatttcctggggaactctctctgggacagcaatattccagggagaaagtgtcattgaagtgagattgaagtgagggtgtggatccctgagaaggtttactgtgcagtttggtatcactgggacaaaaattctaggggctagtgggacaggagagggttggatgacggtcaggtaaggtagatgatgtctaatcctttgctacacattgacgggaaagcaaacatggacaggctctaatagggcacataggttccaccattattttatgccttaaaaatgtcactttaaggagctgaaaagatgattcagcaattaagaatgcataatactctggcaaagaacccaaattctgttcccagccctcagactcacaactgcctgaaacttcagctccaggggatttgatgccatcttctggcctctgaaagcactacattggtgtgcacatacccacacatacacacataattaaaaataaaataaaataaaatctttaaaaaaactaaatgttacttttagggtaagcatactggtgcactcctataacccgggtactttaaatactgagtactttgagttcaaggctagcctgggatttgtagtaagtatggtttggatgaaaatggcccccataagcttgcatgtttgaatgcttggtcctcagttggtggaactgtttgggaaggactaggaggtgtggtcttgttggaaaatgtgcactgggggtaggcttcaaggtgtcaaaaagcttataccattctactcgactctttctttcagtctcttgtttgtggatcaaatgtaccatgactgctggcctcctgccatgctcccacctactctactaactctctgaaactgtaagcaagccccaattaattttttttaatgagttgccttggtcatggcatctcttccagcaatagaaaagtgtgcagtttggtatcactgggacaaaaattctaggggctagtgggacaggagagggttggatgatggtcaggtaaggtagataatgtccaatcaaaccaagacaacagccttgactccaatcccccaccaccacaaagacataggaagagagagttgaagagagagttttgtatatagtgatgtatatagtgaaatagagatatattatgatatatatctcacacaggcaatgagacacacacacacaatcatagggcttatatctgggtagggagctgttgcaaagctaattgcataagggcttgtatttgggcagtggcaatggggaagagaaaatggtttaggaaagctctttaaatggtgaattcaacaggacgcagtaacttagtgcacatatatagtgggagagatctcccagccttatagtaagggtgactggaggaagtgagtttctgctttccaaagcacagcacaaagtaggagaagctttgtgggggtcgtgatgggtgtggtaatgagtgtggtgggggttgtgatgagtgtggtggccgcggtgatggcgcaagagaacaagctgtactaccaatgtctggggctccttctgtggcgctgtctaggaggacatttccttcttgggttcgtagctgaagatctgggtctctttaccgagatcattccagaaatctccaactctacatgcccgaagaggttcttttatcttcttcccacacctctcttgctgttccccaccagagctggcagttcagcacaccaccagcattccattgccctggctatcacactttctttctctcctcccgactgcacattgtttaacctccgcacagtggctgctcctgaagctactgctgcttcagccagtgagtatggtgccacggttactggctcacttctcaggcagcaatccgtgggacttttgtgtctggccagatctgcctcctgctgctgccaccaaatgtagtttttaactaaatctctatcttctattaatcagtaagactcgggagtcagaggcgggggtgaaaacctgctagctcagagaggctgaggagcaaccagctgaccttcctcttcactgttgtctcagaaagagagcctccttctgctctgccaaaccaaaaaagacctccacactcaaagtccctccctactacttcctatccatctctctgtctgtcttccagactccctctgattctctatgactactttctgtcaactagttgctggctctgccttttgacccaaggttgattttatttaattaacacaaactcaaactcaggattcacagtgtgatcgaatatcccacagcgcctgcagcctgtcatcacaggctatgatttaacttcctaaacggggcttgaactgtcttgtatgtccaccagtgcctctgttttatttccatggaacttttgcagttgcttagatgcccctcttacctcccagatccctcctcttgagtccacagtgcagtctgacatcagacttacccaaccacaaatctaaccagtattcatctgcgttaggcctttcccatggctccccatgatttccagaataaaactcacattctctcagttgggatgaaaatcccttcatggtgcttctcctgccactctgtccatccccagatgccattccatccttgtattttatggtctggcagctctcacgagctcagcactctctggcatattccaaagtatttcctacttttgcatggtttctcttccagtcctttacatgctctgcacttcatctgtgtaagtcttactcacctttcaagacaacacggatgtcttcacctctaaaaccctcttagatgtggcatgtttctccaataaccccaagccagaccctgctcccctgtgctccttctctgtgaaagcttgtctccatgattgccctctgtcttagttaggatttctatttctgtgaagagacaccatgaccacagcaactcttctaaagaaaaacatttaactgggcctgtctcacttacagttcagaggtttagtccattattgtcatggtgggaaacatggcagcatgcaagcagacatgatactggagaggtagctgaaacaacaagaagacaacaagaagagagagtgacactgggtctagattgagcatctgaaacctccaagcctactcccattgatacacttcctccaataaggccacaattcttaatagtcccactccctatgagcctatgggatccattttcattcaaatcaccacattccactccctggccctcctagacttgtagcagtatcgtaatgcaaaactgcatccagtccatcttcaaaagtcctcatagtctaccacagtctcaaccatgtttaaaagtccgaagttcaaagtctcttctgagattcatgtaatctcttaactgtggtctcttgtaaaatcaaaataaaaagtagatcacacagttccaacatacaatggcacaggatatatgtaggggacagtaagccacgcctgttagaggctggctacaggtgtgcctgaccacgcctgtaaaggcgtggtcaaggtaaggtcaggatgatacggcatggactcttaagggaccacagagctcatggaagcccttcttccccttatccctggtctcactgctcagctgcccctggcatgctctggcttgcgtttggctggtatttatctgaataaaggtatcttgaacctacaagctctcccatcagatatatgttgtaatttattttaaaatgctgtgaagaaaagtcacaccatgcaacaaggctcacatgggaggtttatttgaagaggagagagaagggggcagagaggggggcaaaaaggggtagagactgccctgaggacaaaagtggtgcagagagagagagagagagagagagagagagagagagagagagagagagagagaggaggtgagcaagggaacaaagtaaatgtgcacaggcagtgctgttggtggctgcagctgagggtgtatcctgtctggatcccaagggcaggccagtacagatgcctgaataccaataataaacattgccaatccaaaatggagggaagggatcatagggaggaaatactagactgaagcccagcagggcaaactccaaactctgcatctccatgtcagatgtcaaagtgctcttcagatctccaactcctttcagcattgttgactacaacacatttttttctctaggcttgttccattcctgttagcagccttcctctgcaggtatcccatgactctggcatctccagaatcttagggtctcccaggcttcaccttcacagcgtcatctaatgacctctctaggcctctatgcaggaatacccctggtatatgctttccttagttgcagagggtgattccataacccctttcttgtatccttgactctaaagccagaagcatgtggctaaagctgtatatactctattgcgtgctggagctgggacatggccccctcaatcaatgacaccagcattctttaattgcctgtagtcctttgactagggttaggccccttgcatgttagcatgtctattggtgtcattgtgcagatcttgtttaggcagccatgttgatgagatttcctttgtgtagcctctctgacatttctaggtaacataatctcacagcaaaatcctctgttcctctggctctttcaatctttctgccccttcttttggaatgatcaccgagtcttatatgcaagaattgtgttgaaggtgtatcatctagggctgagtaccacacaatctcttatttgcattttgatcagttgtacctttttttttctttaaagatttctttatttaatgtgcattggtgttttgactgtgtatattctgtgtgagggtgtcagatcccctggaactggagacacagatagttatgagctgccatgtgggtgctgggaattgaaccaaggtcctctggaagagcagccagtcctcttaactgctgagccatctctccaacctgatcggctgtggtttttataatgaccactacaaaatagaagcttatttgatgaggggtgggagctacatgcatctgtggatgtaaggataaatatttaggctacagttaggggttctgttggtttagtaaagtggtggttttaggttctcttccaagacccatgacttctctagtcctgggttgttggttgtatttacagtaccaggcatgatttccctcttgttgatcagttcctaaatccaattagagggctgttggttcctctaagatatgtatgccactattacactcttatgttactgtgacatgttagccaatattgcggttcataggtgtcaagcctgggtaggactgtcggttacttccctctctcggaggcttggatgataccttccggtaccatcaaagctgttcatcagggaggagactttcaaatcagatccagctcaggccctctgggtcctgtgtccaaagtgcatatatcttcagcaatagggacttacctttcaccttctggtaggcaaccaaaggcaacagcaaatagccaataatgttttggaagtcttctggacagccccgaccaacaattcaaaaggagcctatcatgtctgctgttgtagtgtttgttagatagtcttggggagttcttgatgatagcattattagcccaaatattctgcttttttacaagggatagaatttcaaatgcaatgtatggtatatagttcatgttttatatctatagatatatatactatgtgcatactctgaaagctacaatataagattttccccattttctgcaataaatgtccttgattatgttgttttgtgtatcattttcagggttagttaataatatattcctaaaaatggaattggatcatagactatacacatattcaattttcatagatacttctaaattgtcctataaaacacacagatttatatccataccagtagctcatgttgagttccatttccttggtaggaagacttcattaacatttcatattatccgactattaaattttactacttagggaaagtgatataaagggaaagatattatttttctgcttgattgtttggaattttctaactcattctaagttctttaggattataaaattgcaggagccacagggttatagatagtaactttaaccatgccaaatttagttagttaatttttgtgttgccagggattaaataaaggagtagacaagtgctgtgccactgaactagatatccagccctaattttactttttattttgagacaagatcttaacaaatggtccagaatggacatgaactcatgtagcccagataagagcctcctgcctcagcctcctaagtagatgggattacaggctacagtcaccagtcccagtttatgaagaaaatgtttgcatgttgggtcttagtcttctctactctagaatcgtaacagaaaaaaaactctacatgttccattataattattgttgtttcttgtcctttggtactcgggttggaacccagagctttatgcctggtaagtacatgttctaccactgagtgccattctcagccccactttctgaatttcattagatgtaaaacccaggtagtaacccaactttattttcttcacaggtcacccagttaccccatacatttaataaaatatcaatatttaaaaaatacttcttactttgcaatgtttttattttcattttctagcctttctttctttctttctttctttctttcttttctttttttttgatacagagcctcaggtagtccaggttgacctctaacttcctatgtagtcaaggttgtcattgaacttctaattctcctacctgccttttagtgctgggattataggtgtccagagccatgccaatgtatgctgtatcaagggctgaacccagagattcactcatgctaggcaagcacttcagcacccgagctacattcccagccccggctttagttttgggacattaaaaaatgtattaaaagttttaaatatttatttagtgtgtgtgtgtatgtgtgtgtgtgtgtgtacatatgccatggtgaacatgtggtccgacaatttacagtccattctctccttctgtcatgtgggttccatgaatcaaactcaggtcattagggctggcaggcagtaagatcctgtcctggataattttatgtcaagttgatgtaaactgagaggagggaatctctattaagaaaagcttcactgaagtgctgggattaaaggcgtgcaccaccactgcctgataacactgcaatgttttatggcctttttttttaaaaaaaagatttatgtatgtatgtatgtatgtatgtatgtatgtatgtatgtatatatgcatgaatgcatgtatgtatgtatttattatgtatagagtgttctacctgcatgtatgctagaagagggcaccagatcttattacagatggttgtgagccaccatgtggttgctggaaattgaactcaggacctctggaagagcagtcatctctccagtccctgttttatgctcttataaatagaatttttatagtattgtgactaattcaggacctcatgatctctacccttggggtatatcttcaagccctgctcacttccctgcttttgtgacaggggtcttgctatgatctctaggctggccttgccctccagccacccttttgctgcagtctcccgagtggttggaagcataggcttgcaacactgcagcagctaaactgtattttcattgtgtgtgtatcactgctaatgttaaggattgtattgtattcctctatgagatctcttggggtttagagaggtggctcaggttaagagcactggatgctcttccagaggatctgggtttgcttccagcacccacatggcagtttgcaactgtttttaactccagtttcggggtatttgatgccttccagcctctttggacaccagacataaatgtggtatacagacatacaggcaggtaaaacactcatatagatagacacacacacacacacacacacacacacacacacacacacacacagagagagagagagagagagagagagagagagagagagagagagagaactctgctgaagtttaaccttttgtagttgtgaatttgaccttgcttgccatcacagtctgtggtcattgttagggcagctccaggacaccaagacaactagtgtatatagaaatagtcgatccctgcaccatctctggaatttgaattaagggcttcgcacatactgtaccattgctctatatccccagccctctttgtcattgtgtgcgacgtttgaatgtgcatgcccccacccctttttacttttgagacaaggtttctctaagttgctcaggctggccttcaagtcactctgcagtctaggcaggccttgaatttgcaatccttctacctcagccgccagagtagctaacagggccacccaacctggcaaaaagtggttttccagtattgacctgtcctcataaaatgagctgcttcagtttctcctgcttcagttttgtagaagagtttacactgagggtccagagagctggctcttggtttaagagagctggttgctcttccagaggactggaggctggttctcagcatctgcattgattagctcacaactgcctgtgattccaggcagatctaacactctcttctagcctctgcaggcacttgcacacacatgacatgccctcagacatacacatacataatacacataaaaaaaaaaacaaaacaaatcttttgaaaaaatgtcgtgttctgcctgcatgtatgtctgctggccagaagagggcaccagatctcactagacatggttgtgagccaccatgtggctgctgggaattgaactcaggacctctggaagggcagccagtgcttttaatctctgagccatttctccagaccccaaaagaaaccttttttttttttttaaagtaaaatcccattggtaataggatgggttggaggggatgaaatggatttggaagtggtggtgttctgaataaatcaagttgggcactaaaggaagataatgtgttcctttgaaaaactgtatattttaggtactgtgatggatagtgttatgtgaatttgacacaaagcagagtcactggagcagagggaacctcaattgagaaaatgcctccatgaaattgagttgtagacaagcctcacaggcagctgcttctcaaccttcctgacactgtgacttttaatatagttcttcatgctgtggtaacccccaaccataaaattatttttgttgctatttcataactgtaatttttaaaagttttttaaaaaatatttatttatttattatgcatacagtgttctggctgcatgcatgcctgcaggccagaaaaggacaccagatctcattacagatggttgctgggaattgaactcaggtcctctggaagaacaacctgtgctcttaacctctgagccatctctccagccccataactgtaattttactactgttatgaatggtaacataaatatctgataagcaggatgatcttaggcaatccctgtgaaagtgttgtttaacccccctcaaggggtcgagacccataggttgagaaccacagctgtagggcattttcttaattggtgattgatatgggaaggcccagtccattgtgggtggggccacccctgggctggtgatcttgagttctatatgaaagcaggttgagcaagccatggggagcaagccggtaagcagctctcttccatggcctctacatcagtccctgcctccaggatcctgccctgtttgagttcctgtcctggcttcttttaatgatgaacagtgacgtgaaagcataaagtcaaatgaaccctcccttccccaacctgcttttggtcatagtgtttcatcacagcaatagtaatcctaactaggataggtggccaaagaatatacatgtctaaatgcctagcagggagttggaaacttgaatttgaagctaagatgagagacccggagtctgaagtgtcagtacgtgagcactgactaaattgacagaagacggcgttgttctgggagagcagtatgaagactaaaggagcacaggggtggattccgggcatttaagaggaggaaggacatcccacccggcaagcttcatagcgaaggcagaaggaagggcactgaagaggaagctgttcctttaagaagatgaggtgagactgtgggtatagctcagttggcagagtgcttatcaagcatgtgtgacactctgggctcggtccccagctccatataaactggacatcatggcacttaccagtagtcccagcacttaccactcgggaaggaagaagggaagttcaagaccatccttggttacgtagctgtggtgggtgggtgggttgtggtggggggagggaagagaaggaagagaaagctgaagcaaagatgggcactgagtggaggtttgtttgtttgtttgcttgcttgttttgagacaggctttctctgtgtagccctggctgtcctggaacttgctctgtagagcatgctgaccttgaacacagctcacagaaatccactggcctctgcctcccaagtgctgggattaaaggcgtgctcttccactgcctggctgggatttgattttgttatgtgagacgcaggagagtgaaaaggtcaaagtcgggtatgggagagactggggatggctgacagaagtggaaaaggacaagacctgtctcctgcaggggtggggtggggtggggtgggggcagtagtcccaaaaaaggtaggacagtcgtttgttcttccagagaggaggaaggaaatcaaaaattttatggtggtgaatgagatgcccccctccccacactacctggcagttgagtgctttgtccccaattggcggcactatttggagaggatctgggtatagccttattgaagaacgtatgccattggaggcaggctttaagagtttaaagcacggtgccacttcagtcttgctccctctgcttcctactgccagttccagatgtgagccgccagtgtctgctccagctaccacgtctgctgtttcccgccccatttctctaccgcagtggactctcatccctctagaactgcaagccaaataaacccttccttctataagttgctttggtcatagtgttttatcacaggaacagaaacgtaacaaaaacaaagttatagtagcgattcttacattggaactatcacttaaggtaactaaaaaaaactgcccatagttggacgataccttggacgtttctggtttgattagcatgggataagtcctgggcattgctatactttcagggtttcacctgagattgattgtaatctatgatgaaggttgagaaccactggcttaatttgtaggtaactttttagattggtgataatggaattggattcgaggaaactcacaattaggaagggctaagtgagtagagagagccacaaaagcgtgagacagatgaaaatagaggaaagaaagaagttagaaaggaagggattgggcagcaacccagtggttttcatactccagaggtctagataccgtgccagtcagtcctcctcttccttcctctccttcttctgtttctgttttgtttgagattgaatttcgccatgtagccctggtttgctgggaactccctatgtagaccaggctctcctggtagaaatgagaggctaactcatagagatccactggggctaaaggtgtgtcccggcacattccagttgattccttgttcttaaagaagtcaggttcttttgtgagagaggcaccttacaccaactctagagtgttagaagaggtcttgaccagttaagggtttttgttatttcattaaaagataagaaatcagcaattctatagtataggttgggtttagaaacacccatgctcggtcgaacagagagcttacattggttgtgccaatcatcgagccatatccccagtcccttgtttttctgagatggggtcatgctatgcaactcaagctggcctggaactcagtatgtagcccaaggtagccttgaaatgtcccgatctatctatctgtgggacactgagtgtgtcatcattctggtttacaaatacttttgtcagaactgagaacagcccttccaggaaggtgagcaagggctaagaggagcactgtcttacccctaggttttatccataaacagcgagaagatggagatctggcctgtgggtacctcactgtggtcaccaaacctgataagtacctaaaatctctagtcagtcacattgaaacactctgtgttcccagcacttaatggccacccataactgcctataactctagttgcagggaatccaaaaccttcttctggcctccttaggtatcaggcacacatgaggcatacgtgcagacaaaacactcatatacaaaaaataaagatgataatttttttaaagagcaaaacttttttttttaaagtcctactttccattaaagcagaagacctaatctttatcataagaacaggacagctttcttgccacaggaagcaggcattttttctatagcctggactgtcctcctgaatcgaagctagtctcactttttgaatctttcttgaaagacaaaacctcccagggtttctgagtcatgcctgggatgtctgcttgttccatccttactgcccaggaccatgagttggcaaggacttaagagagcttttgccaaaggccttgactttggactaggaatctccttccctgaacaagaaagaaaccaggaaagaaccagggtgccctaggcatggaatgggaagggaagggaagggaagcttgactgagaattcactggggccttgtgggtctatggagtgggctctctctgttacctcattagtactttttatatgaatagaattgaggtttgaataaatcagtaagttgattgtgcattcacatccaagaatggtaagccagacgtggtggtatttgggaggctgagacaggagggttttaaatcccaagcgaggttgactacataaagagacccagactatataacagaacaaacacacacacacacacacacacacacacacagataccctcaaagtccaattgtacttggtccttcgggctcctggcctccctagtttccagcttgttgccttactcagggaaattgtggttagatatcacctgcctcagtgcttttcttcctaaagaattaggctaagacctgaatacatgacccttgtctttgggtcttggcttctactctgtgatttgaggatgagtgaaattcatcctaagggtgagagtggagggtggtgcagagagctgttggatgggacacactagaacagtaacatttaatgtcggaaagctctataagacagtattttcatcgcagacataatttctcaattatgtctcatcctcagaggggagaaaggaaggactgagtgtattccaggctcacacctaacagattttaatcctgaagtctcatgtattaacatgacatcttgacatacatttcaagctttagctggggtcagtctacaaaatcatttgtaattctgacctcagaaactcatttccaattctttggggccttctgaggtctgggaaaccagctggcaaaacatgaatataatatacactaaacataacagagagcctgccagtgacgtggcagccccaatactgtcaaattacaaactcagcattggatgtgtgctttggacagggctggggactccgatgtctttcctatctcctgctctgctgctaagagtccttcccttacattcctggtgttatgggacctcctcagagccgcccagtgtcagcacatgatggaaataggtgaatgagggccagtgtgcttgcacagagtctggtacttgaaaggatggctgttacctgaagtcttggtgctaatgggggaacagtcgctgaggaaaagcaaggctttggcaaggtagatgggatgcatttgtttagactcttcacctttgaacagtcataacgcagacaaagacaatctgtccccaatgtggggactggttaggatgatgagactgagttttaggaaagactccaatcagagaaaggaacaggggccaggagtggccttctctgggatttcttaatcacagggttgggaagggtaagtatcagaattgaaaggtgggggtgttgagacctgtgtgaagatgcttttgaagcggtactgttctaggtaagtggcaggttacagggtaaataatactagcggcagtgtaataatacttttgctttcactccctcggagggtagtctggccttcaaacagtcactttatgatgggctcacccctgttgggttccttctcgctttaggaactggtttgtttcttagtgtgctccgaagtgggaatgccttaaatgtgccaaatatgttatgctaacctatactactccccggatcccacctgcaaccctcaactacccaaaagtcctagggtggggagctaagagttacgcacccgacccaggcattttttactctaggcttcctgggcgaaggccccctcccctccgccgcccaaagtcgcgggcccacgtctccgtctccccctcccccgttcccgtagggcagaattccctttgtaattaatcccaacactcaaaccagaggggaggaaaacgtgttaatgagagagcgtcccagtctgactaggcggtcgtcgctcacagctagaacaccaagtaattaaattatttttttggaagaagggggggtatggtggcgatggtgtcagagaaattccgtatacataggagtggggcctgtctcttgtcactaattaaaatcagggatgacccttttctcactcagctctgggccggggttgggagggggatcactcttcccacgtctcagattccattggattttgtgtggccgggtttgtggtcccaaagaagagaatatggccagcatcagggcctaggggaaaggtcttcaacgggggtggggagcgggggggtctcagaagacagctccaagaggggctgcgggttggaccaaagccaagaaccgaggcagcatcaagcccaccttcctggccaggtccgcaaacgcggagcgggttcccaggatcccgagggcgcagggcatggccaggcgcagagctgggggagccgcgacttggggaagagccgggccgcagacaatggacgcagcggcgggaggggcggcggccgcgggaacagccgggaggcggcacctgggagcgcgctccccgccccctgcccccctccggtcccctccccctctgtcccctccccctccgccgccggctcgggatccgattcctgatccccgattgctcggtcctcggtcccgccatgggagcctgagcaccctgcagtcccccggccccctgcccccggggcctcgagggggagagaggcgagtggtgtgggacggagccggggtgagcgaccgcaggagcccccctcgacaacccccatcggccgcgctgccgctcctggagcgcggagttcggagcgacccggtgcgctgcggatacaaaggcgcggagcggagcggagaggagcggggcgtgcgcctagtccgcccggctgttcgcagcggcgggtgagtggcgggcgggccgcgggggcgcgggcaaagtttgcaaaaaaagaaaaaaaaaaggaaagaaagaaagaaagaaagccgcagaaaaaagaaggaaatcatgcaaaggaccagtgagcgcccggccctggagaaagcggggtggcttctgggggaaggggggcttgcggcaacccccttccggtctgttctccactgcaccgcggagtaccctcaactttggggaggggaaggggcgcgtggggaaggggcggagcccaggccttaagagccggggactttcctgggccgggggcccgggtcgggcgcttgaacgatcccaagggagcccattgaagccggggattgggaagcgtgtgttggaggtggtgggagaggccgtggaaggattggaggctggaggtactggaagcagaaggtatggagggatgcatatacacctttgaagtgtggggagggaaggggcaggtatatgttcagggtgtagagtggatccctgagagatggccctggacagctgtgtgtgtgtgtgtgtgtgtgtgtgtgtgtgtgtgtgtgtgtgtgtgtgtgtgtgtgtgtgtgtgtgtgtgtgtgtgtgtgtgtgtgtgtgtgtgtgtgtgtgtgtgtgtgtgtgtgtgtgtgtgtgtgtgtgtgtgtgtgtatgtatgtatgtatgtatgtatgtgtatgtgtgtagcccaaggatgggacttgcggcgataccggggaatgtgtgtcggggtgtgtggggagacgacatcatctctctccctcgtcctatttactcatcgaaggcctttagcactatattagtgagttttaagggttgatagggggatcagtatgcatgattctttgtttttatatgtgtgtgtgtgtgtgtgtgtgtgtgtgtgtgtgtgtgtgcacacgccttgacgtgctgcgtgttcctgcaggtgggccctgggtttggatgtatagatgtttctctctctctctctctctctctctctctctctctctctctctctctctctctctctctctctctctgctctgtgtgtggtgtgtgtgtgtgtgtgtgagagagagagagagagagagagagagagagagagagagagagctgaccacgtatctgctgtgtttgggtatgtatttgtgtgtatactctagggaaggggtgtgtatctgtgtgtatgtgctgagagagaggcttataggaaagatgtgggtaggtattagagaaggtgggtttataagagcagaatggctagtgtgtgtgggtaggtgtgtgtgcacctgtgtggtgggaaggggtgtgtgtgtgtgtatctgtgctcttgtgagtaacctgtactgatgggtagatgtcagtgtgcctgcctttgctagggcgtgtatttttgagtgtgtttttggggtacctcttgtctctgcaggcagattttcctggcagaaagcccacagggaagctgtctgcaggatttaaatggctctgtttggttcaagggtactgtcttgagtatctgagaccctattgggggttgtgcatttgggttgtagtgcattgtcttaggtggtgcttatttggaaagacgggcttttctggaagacggtgtgtattgtggggaatgggaaataggttcaggggaggtggaggggctctgtagtcctaaagaaattttgggattcaaggagtcaagaacacaaataagagtaatgaccttctccactgttacaggatggactttagtgcgtagtgaggccacatgcttggcttctctgccccagttactttctctgaggtcacagctctcttggaaagccatcttgaaggtggctacttcagagccctccaactctgccctgtctatacaatccgatcctgaggcgtgtgggctggaggcgagaagaagcatgcacagtggcatgagacctgggaggagctgcaggattgagcgagtgacatggagtgcttctctgggagtttctgcaagtgtgtctgcgtagtttatcctgcagtttcttgatgagaagcactctttggatggtgtgtgtgtgtgtgtgtgtgtgtgtgtgtgtgtgtgtgtgtgtgtgctcgtgtgctggcgctgagcttgccagaggccagatatccacatggtgggaaggggctgtgttcgtcatcatgagagtgggtgggaagtcagaggccatgaagacatctcttcctccctgagaagcagcagctacctccttttcctctttgctcttgttcattctcttttggggtgaagagaagaaaggggtggtcatctcctctgggacccaggtcttgtttccagctgcatgttctcaaccattttcctcttgctgccagaggttagttaggcggagacaccggttttaagagaggggctgtagttgcacatggccattagagtccctgggtaattgcaactggaatgttggtctctaatgggcatgtgcagttggaatgttccatctttagccctcagagctccctacccttcataaagcctggggaaagagtggaggggtttagaaactgttggactaggaagaggagcaggcaaggaaaagaccagatttttttcccccaattgttccatttcttcaaaccagatgcctatcagatggtttttcccaagccggcaaaacgctgtgtctaaggcaagtgccctagctttctggcataccttatttgctcagtttatgctccctaccagtaggagttgtcctccaagcgggaggaattgtggttagacaataggaagtgccatttcaaaaagtacttccagactgggaaccagtggccacattgccctccccccccttctctgttgtcttggtcctgctttctacttctctcgttcccactgggctgccttcctttctgtctctcaccttcttgtaggacttgaggaggaagatcctgctttccctggccccttcattccctctgagccttagggaatacacttttcttttttgctggctcctccactatgaggacaaaaggaagagtcagacagtttcacttagtgctgagagcaatgtgacctgattcatgtaactaagcttcattccttagcctcccaggtgttttaagacatcatcctccaagcccactctgaacccatccacaaggaatcccaagtccctcttcctactctgtgccctctctcccatgttgacagtttgctcttaacttcttgctttgccacatcctaattctgtgacctcagacaaaacggataacttttgtaagcctcacctgttccctggggttgatgataagctctagttcttaggtttatgaggagcaagtgaaatagcctgggaggagtgtgttcctcagtgccttggcacaggggaaatgacttagtgaatgacggatgtagtaagggatggatgtctgggcagtagggcgggggagcgagcttactttgtgcactcctggcagatcacattcagcacactccgctttctgccaggtgttgtatgaagcacgggggatggaagggtgaagaagacactgttcccagggggaaacgtgcttgaacacgtcgatccccgtaagcccctgagtgccggatggaggtgtattctggaggcccttgcagcggagagtttggttctgaggtggagttttgggcgaggttcctgaaggagatgtgttggccattggagttttagaagttaacatgaaatgaacattaaagagaaatgggatttagtgcacacacacaataccgggcaaccatttctgtctaggtatggaacattttcactagccccgaaagaactgcagacactttaagcttagttcccagtgccctcttgttcactgccaacctgcactctgtctctgtggagttacctgttctggctatttcctctaaatttcatcattttaatgtcaggcttcctctgctcagcatgtttgcaaggcttattcatgtggcagcatatatatatattattatatatatatatatatatatatatatatatctcacccctttttatgccttagtaatattctacgacatgcatgttccttagatgaccctgtctgtctgtctgtctgtctgtctgtctgtctatctatctacatcatcttgtttttttctttggctggcctggatctcgtagatatctgcctgcttctctggttcttaggtgcaggaattaaagtcctgtgctatcacgcaaggccctttatagccattgttttttttttttttttttttttttgagacagggtttctctgtgtagctttggagcctgtcctggaactagcctgcttctgcctcccgagtgctgggactaaaggcgtgcgccaccaccgccgggccctttgtacccatttttaaagcatagaagacagggaggggcttgctggtagaggctgagcataaacaaggactgtgtttgttactgctggaacttgaagtacaaagttaggatttggtctcagtttccctagctataaaacaaaattaacaattagcaaatttaaaaaatgtcctgtggtgtttgttggcatcagggagagaaactgggatggtattacctcctctcagactttttttaaacctactctttgctcttctctcctcgaagctcccacctgtgcccttctacgctctttcctgctttaccttcgatcaacctcctctctgagttgacctgaaacctcccaccctctacaggtgggtaatcctgtgctccacgtggttttgatagcagaggtgccgacggactgtctatcctgcttggtcttcgacaaccctttgtcaccttctctgctgtgatctggacagaactacagtgggcggggcaggattcttttcatcttttatccccccctctgcttggtacagagtgggaggcacaggcttcaatggtggggccctttggaaatgagctgttgcaatgccagtctgatgcccctggcaaggttggtaattacagacaagacagctgggaatggggtttgggagaagtgagcatggactcagcagcactgggcctatcctggtcatcagggcgcggccctgagaggggagagtgggcagtagccgggggctggggcaggaggcttggtgcctccttcctctacccatctatgagcagctaggatgagagcctaagacagtgggaagccattgggtcctaggcctgacctcactgaggaagagggaggaggagaagagagaagcttcttggatctcttcctagggatccaagagctccctaggaaacagattactatgggattagtttctggctgaggcctatgttggggaggaaccacctctgtacccaaagatgattcctcctcattctgaatggaatctacttttaaataatgaagcctgaggaaaggaagtagatgcagtaactaaagcagctgggaaaccaacattttactgagcattagtttttatctaccgtctatctatcatctgtctgtctgtctgtctgtctgtctgtctgtctattatctctctaccatctatcatctgtctgtctgtctgtctatctattatctctgtatctaccatctattatccatgtatgcatgtatctctctatcatctaccatctatcgtctatccatccatccatttaccatctatccatgtatgtatgtatgtatgtatgtatgtatgtatgtatgtatgtatctatctatctatctatctatctatcctttttaagagatctcactgtgtggccctgactggcctggaacttgttctgtagactaggccggcctgcaactcacagagatttgcctgtctctgcctctcaagtgctggaatcacacagccgtggccatcacacctggccttattgagcatcttgtatgttacagcttgtgtgatttactggatacattatataaggaactattttccccattttacagacaggaaaataagtttagagaaggcaagggagtcttcaagatggctgtgcttgatctctgtgatttctttgctctttggtcttccttttcccaaagtgctcttgtcatctgtccatgctgtcatcccagttctatctgattgctcattcttggctttaatcttggacgtgactaatttctctttcgccttggaaagctagctccagtccatatagcctgatgagtggagacatcctccaaggatgagaaccagatggggtgttatggagaaaccccatcttttcccaggatgggcacctcattgtctaggccacgtcaggctccattggagctgaagctctctcttcctttctgtgtggagcaggagctgcagctcagagaataagcttcactgttgctggcggttaacacttcgccgccgtagctcttggagtcttgtgtggagagggacctggccatcactgtcataggattttcccatggttgtaactgaagtacttcaagttctactctcacagtgcctggctcccccagcctggacagaagacaagagggggcttgtgaatgggggctctgtctttttaggataaaggaggaggtcggacagaaaaggtgccaagcctgaggcgtgaggtggtaactcagaaaacagtcatgtgtgaacagaaacacatactttgtcacctgctttactccaggaatggaagtgggagctagaaggacgggggagttgataatcttcagtgagaatctggtgtgagggaggtgggtgttgtgtgtggggggggcggaggcctttcagtgttcctcgatatgagtggccctgggttgcggtaggtggaggaggttttatggagaaacccaggcctgccacacacacacacacacacacacacacacacacacacacacccggcacaccgtgtctcacactttgaggctcactctacggcttcctatacaatccggccttcacccacagcgtcccatatgtctttcttcccccacactccttctctacatctaagctctcctggtccacattgccagcctgaggttggctgacttccctttcctaaataactcttccttccttgaggcaggggctgggtgagcaggctttgaggtttcttggggttaaggacagttgaggcctacttaggatatcaggccatgcagacagggaggcatttggatgactgtgtgcgggaagtgggcctgtgggtctgcctagctcatttacttcctgttgtcctgccattttcctccttagtccatcctcacctcacctggtgtgtggggaggggcctcttttgccacagcctgggaggcagcagcttaaagccctgtgggtggtgaaaattaaatagagcatcctggcattccagtcctggttgcctctgtacaagttctgtgtcctctctctccctgtagcctcaacctgggaaagatgccaaagggaatattcatccctcaatatcccactccagactgaccaggcatggggctaggggaaactagaagatgggatgctatgggctatgcgtgtgtttgtatgtgtgcatgcatgcgtgcatggtgtgtgtgtgtgtgtgtgtgtgtgtgtgtgtgtgtgtgtgtgtgtgtgtgttttggattgggggcagggacttgagaaccagatgggggtaggggtgccagagagagcagaacaggtctctacagaacctgcctagccagggtgggtggagctgggtggggcaggcaggaaccattccaggtttcagaaggggaactagaatgtgtgcgtgtgtgtatgtgtgtcagtgttttgtgtctagatgtggagggtatcctccacacttccctgctttacatctagagatattgcagaaggtggaaaggggtgtggctctgccttctaactcctttctagttagtatctggtaccctggcaggagcccatctgtgggcacttcccctgctattctgcccctcccctgcttaggagaaggctcctgcccccaccccggggctgtgaggatggtgagctcatgtctggccctctcaggagagtgcttggttagcagtacgggggtggggcacctggtgccagctcctgggcacctagctttgaagccttcccactgggccccctgagatccagcttccttctttggcctcttgggtcactagagtcactggatcttttctgagggcagaagagtgagtctggagcccatttttaggccaagggtggctcttgcccattctgtgccttggttctttctgagatgggaaggatgtagcatgagtctcttggcatgggtggcttgtccgtgtctaaggttgggtggggaggaatgaaggagggctaaggctctttggagtggtggctggttaggtatggattctttgccattgggcttaggcctgcctgacttctgactctttgtccctgatgggaaggcccagggcaggagacagcaaatctcccacttccctcagcttcttgtggtggtgtctgttgaaagggcaagagggaggcttgcagaagaatctcagtgcctttcaagagaatttctgccagcagtaagaggccagaatgggctgtcatggagtagtgaacactgaccagaatttccctcttgagttgctattcagctaatgcttgcagctgcccagagaattgggtgggtcagttcactgtctcctagtgtaggagagatgaaggagaaccagagagctccaccactttctttagggatccaggctaggtgtgtatttcacccaaatcaaaagccttgagcctccactattgcctgacagtgccagctgtttggactcatctctgaaactcaggggatagtgcggtgaagaccagatgaacctctgaacctttgccctatgtcttgatgatcttatgactaggtgttccgctcctggccagatagctaagtaaaccccaaagtagacactcagcacttgtgcctgcaacttaggagtcactcacctgtgtacgtgttgtgctgcagaaatggggccaggccagatacaggaagaccctgtctgtctcttgtgtaggaatcagagggctgtaacaggcaaggtcccacagatggatgcctattcaggaggccccaaaggattaactgtgcccaggcaggaccacccttcctggtccctggctgagaagaggaaatggggcctggcagggacagatctctgtcaaagaatcgcagaacttttagcttcttgtcttatgaaacccaggcacccctctgccccatagtcctgctactccagccctgttacatccttatagatgaagaacagccagccccttctgaggtgtgcgcttgtgaccggtcccttccccacctttctcctctggctgagtcaccctggcttcttcccagacgtatcttcattgtgttctgcctcatgtccccaccccagctctgaagacctgaactgcaccgctgggctagagcagcggcaaaagggggcggtgacaagagactcctatgcctggttgttgtcctgagcacctgccacacgtgaggcgccttgtgtgtatgtgcatgcgtgcgcacacgcagaacacgactgttcactcggctgtgcctgtgagtggccaatgaggcagggtcatttggtcctgttatgttctgtgtttaccccacacccacatccacccgagttccatgtaccccagggccctcttgccaggttttcagtttatttttttctagaggcctccgattgtttcttgaagaaacccgatcccgagctcagacaaaagctggggctgccagaggagaaaccccattctctccccctgtcccattcccccacctctataacctttctcgctttggatgctgggtatgggttccaggacctggctgccatcacctaggcaacagggggctttggttgctatggtgatcaatgtgggagaagctgggcagccgggacaaaagcccccacattcccctcagccctccccccaattcccttgggacgatactgagacattccattaattttatttctgaaaggcctttggaggggagaagggtctcctttttgtgtggggctctctctgctctccctctctcctctttggcctccttttaaccccagataatccatggctggtttgagtaggggactaggtgcctgtgtttgtgtcctgagaagtgggggtgagtggaaagtggggcacatttgctttttacagcctcccaccctctgcccctcagctgggtgcagctctctgccctgtgccaagtccagacttctctcctgtcttctcatcgctctgacatttctacttgttgatctcatccatgggtcccctcccccagcttgtttcctgggaacgctgcccacccgggagaccctccaaatctgattcttgagaccgattaagtaagggggaacttctgcccatctttctgcctaccttttatccttccccaatgctgggattagctgccttgggtacccaaaaggatagcaggcaaaggcttcataagttatggtcctttgtgccccctgtgtttggtagttgagggaagagtatgtattgttgcattttgggtagctccctctatgtggggtttgtcttttgctagggagaatgggagggggctgcaggctaagtagctcagaacaaagagttgggagatggctggcaccctgtgtggcttgaaatttatctgcaggggaaacagagcagcttcacctcacatctgggtgtgtttgcagtagtgggtctggtaggggtgtgttcgagagagagttctttatttagtcgtatactttatttataccaccgccttccctagtttcagaggaagtggctggggactggagtttgagagcttattaattgcttaactattagtggctgcacgttctatggaagcacacttccttcatccctgtgttcctcagagctaccccatgaaggagaggtatcatcacctcttgttttaccaaagggcgcaccaggtggtaagcacagaagggtcagaaacttgtccacagtcacaaaactcagcattgggagaggttcgttttaaatccagatctttgtgtaaatcccaggctctttctgctgttggctctggcagatagagtgcaggtatttggggtgaggatgatgagcaagagggctttcgtgtctgtctgcatctaatctatggcacttgtttgcattttacttcacccaccactaccccaccatctgttggtcttagagcctcctggcaaagttcagtttttaagaggagaactagaaagaataggtgggaaccacatcaaaaacatcgcagccgcgattgtctaaaccgtatggaggagtaaaccagtagagtgggttcccaggggaggggtagaggaacccaacatgtaatttgtagactgaggggtgaacatggcatgggccctgtttgtggtcctgtcttagagagagaggttcaggtttgggttgaagtctatctgcccccaaagtatgtctctatcacctactgctttgttgtgggggtatttatatcactggctcatggattgcttccatgtgactctgttcggaggagaaatgaatagatttcacattgatgatgcttatctccccgcaaaggcagtttccctgatggtcagacaagcgtattcgtttactaggtgggtaatcggttacttgccctgtacccacaggaggggaggtgtctgcaaatacgtatgacttattctgctcattctccagttgctggtgatttaaagtggttggaaaaggggtaactccaaaaagcaagtctgttccagtgggtaaaacaatggacttctcagcagcgttggacctggttgtacctattcctccctggaagtccgcttgtcttgttgactgccttgagattacactgtgctggcctctggtttctccttctcggcctctttgcttgacccccccccccccccccatgtgcagtttggagtccttgcatccaattacatggtcctctcctgagctcagtgtgcggtctctgcctgtgacccatacctccagctcagactccagctctttggatgcccagctgtgcattccccacagccagtactcacagccctcctcaacacgtttgctcatctccacacatgctgtttcataaacactgtcctcccaaatgggtcttctccttctccaccgccttaccagatactcagtaacttctcccttgctcaagctagacttttttttttttttttttattgcattttacttacttatcttgtggtgcttgactgggtgttttgttgctactcacccactcagtcagcctttcatcgggtctggttggttctgtgagtccatttcttacctcctccttggttctggtggccaagtcttcctgccatgagacctcctcactgatctttccatttctgccttttcttctttccaacccaaatctggacagctaaataggcttcctgataaccttcgagtaaaacccgacctcttcgcttgcctcccgctgcttctgtcgtcctttgttgtcctcagctgtgctggttgttaagtgcacagagccctttcttgatctggccttccctgatgtggttatcaattccttcccgtcctgggactttctcttcctttcttgggcatccgtttaagtgtctttcttctcatgtttccagacactcagtttatctccatgggcctggagatgtagctagctcggtggtagcatgcttgctgagaacacagggttcaatccccgatacacttgcctgttgtcatctaaccctcaccccactcacatggctgcttgtatttattggcttagctgtttagtgcacatcttcccagaccataaactcagagtcagttacaccacaatacccagggcatagcaaagtacgtagttcaaagtaggtgactttgagaggcttgctccatcagtgagtgaagacaggaagtgctcagggcacggttgatgactgaagttcctgttgccagcagcagtggagaagatgacccaggttgctagagtagctagggcttttgtgagagttggggctgggctctggaggatggtgggtggcgcttggaaaattagggaggagataccatactctgctgcagagatagactgcagtgtagataaagaaggctgcccatcagcccagagtggagagagacttggatcttgcttaaccagaggttttagggttttggaggatgcttctattacttcaccatgctgtcagtcttcatcctccatccacccatcaatgagacagagagagagagggagagggagagagacagagagagagagagagagagagagagagagagagagagagagagtctttgtgagcttatacatacacatgtctgtaagttaatgttttcctggctgagaataggaaagtactatattgattcttcccaatggggcatccaagctgggttatttggggtgtccttcttgccctgggagcttgtaccagcatttccccatccctgaatactggggacactgtgtatggaggatctttctagctggcagagcaggaggagctgaacctattggacagaatgggaaccaaaaatgaggtattctcacttttgtgtctgggctacccagagcttctggtgacatttggggatagttttcttttgtgtcctcacccatggggagccccagctactcctaagcaactgctttatctccttagggatcgtcgcttgaatttctctgagataagcccactcgtccagcaaaatagagtccctcagggtgacagttgacttcctaaaggtgcctcttggcctgaagaagcccgtgctgaaggaggtggctgtggggccccccaagaggccccagcccgcgatcctggagcgctacaaggcacggcgttcagacgccatggacaccgagtcccagtactcgggctattcttacaagtcgggccattcccgcagctcccgaaagcacaggtgggtacggctgaatggtggagcggtctggctggtggagaggtggtataggttgaggtgggcgggggcaggggaccgctaaaagattcccctcttgaccttttggtctgtttctctggcttcctgctgcagggaccgccgggaccgacaccgctctaagagccgggatgggagccgtggagataaatcggtgacaatccaagctccaggagagcccctgctggacaatgagtccacgaggggagatgaacgggtgagtactggggataaagtggtttagagttgacatttcctgatccctttcggggatgtggagactccactaggcaagggaagggctgagagagatatctggtctcctagggtagatacaggatccagaagggtatctttttgtttttcaagatagggtctccttttgtagcccaagctagacttgaactcattatgtagcccagactggtcttgggttttgttttgtagttttgtttgttttgagacaggatctcagagtgtggccctggctagcattgaacttacagagatctgcccgcctctgccccattaatgctgggattaaaggtgtgtgctactatgcctggcctccagactggtttaaaaatggaatccttcagcctctgactcccaaatgtagggcttacaggtgtgctctactattcccttcctttgtttagtgttctacagtggagccttgttggaattcaggggattttagaggaaaccctttcggaagcactagctcctaccctttctcaagggttttgctgagtaaggagaaatgtctcaacttctccgaagcccctgtcagcaagtcaggctggtgcaggctgcagtaggacagccgtagaccacaggtgtccctatagtctgaggtttacgccccctgctgttagcatatgaaacagcatcatctaggttctagagaaaagagctttgggaagaagaataaatggagctagaagaggagaggctgagcagttaaaggaggcaccctggaaaagaattccccggggcagagggagcccttgtttctgccctaacttctggttcactgcattccctgggtcgagaggacagcaggcaaaacacagtcctggaatttaggagggacaggatttgcagtgacactgagattgcccaagtcttatttttcctgcactttcttcttggaatcatcaggcaatggagacgcttagcttctttttcctcagcgatccaggcctcggagatttttgaagtgatcttgagacatgactaggccttgatccttgagagggtagacagtgtatctggggtcaccaagtgagggtgtggttctagtcccacagctgacagtggccagcttttctgctttctatattcagatgggattctttccccatccttgggagaggagattcctcaacttgctagtcattggcccttccaggacaccctctaccctaccctgcactgtgtggctcagtcctggaacctgcatccccttggtttcagggtatgactccatgtgcccaggctgccctggaagtgaattgtgggtactgaaagtcctggtggtctcgagatttctttgtaggatggtctctagccagaaaaacagatttgggtagatcacactctgaagggcacccgaggagcccagcttgtccactgcttacctccacagaccctgtaccatggttcttcagatggttgcccagcagagctggcttcatagagacccacggtgaccctgagtctgcagtgtttcccatatcctatttagatcattcacagctcgtcctatctcctcttgtcccttagtgagcaaacagtggtagcgtctcatggttggagggtggatggctttttaaaaagacaaggtctcatgtagctcaggctggccttgaacttactaatgtaactgaggatggctttgaacctttgatcattcttcctctacctccccaaatgctaggattacagcccccccttttttttctcttctttgagactgtcttgatctatggccccggctaatcttgagctcacacagtccccctgcttcagcctcctgtgtgctgggatcatcatgggtaacctctcttgatgggatagatgtctgtcgcttagcctggcattgccacatggcctgcacaaatggcttttgacttccctttcctaggctctctgctctctgcccctgcatctccagctccccaaatctctgtctgtcttctgttgaaaccatggacttctgcaaaagctggaagaaacttaggagagccctaagttgaaatagttcccgggcatcttgttaagtgcagactgtggctcagtaaacgagggccggcgtgtggttctgcgtttctcacgtgctcccacgtgactcccacactgctggcccgcagagtgcattctgacagcagccccgggagatcatttagttcagggttcccaatcgtggctgagcattataatcatctcgggagctttttaaaaaaaggttgacaagcagatctcactttgcataattggtatgttttccgaactccctaggtgattctaatgtgtgcagctgggtttgggaaccactaattcagatgagcttttgcgtgtcaccagccgctggaggtcatctcgggtcctgctttgcctggcaaacctgcccttgggtcattgtcactgcccaagctgtttccttgccagttgtcctgtgctctgttttttgggggtcgtcaccgcacatgtcatgttttcctccccgatctctgtgcagctccccaaggacttgggttttatatttcgatttctgcagcgatgcgatgggcacatggtggagctcagtgaattctctgatgactgtatttttgttgatttcctcccttctttctgctgtctgctttcccatgtgctcctctgtcttctctgcttaccctttcttcttcctcccctttccgactgtaggatgacaactggggagaaacaacaactgtagtcacaggcacctctgagcacagtatctcccacgatgacctcacacgcatcgcaaaggacatggaggacagtgtcccgctggattgttcacgccacttgggcgtggcagcaggggccactctggcactgctctctttcctcaccccgctggctttcctgcttctgcctccactactgtggcgggaggagctggaaccgtgtgggacagcatgcgagggcctcttcatctccgtggccttcaagctgctcatcctgctgttgggcagctgggctctgttcttccgccgtcccaaggcctcgttgccacgagtcttcgtgttgcgcgccctgctcatggtgctcgtctttctgcttgttgtctcctactggctcttctatggcgtgcgcatcttggatgcccgcgagcgcagctaccagggtgtggttcagtttgctgtttcgctggtggatgccctactctttgtgcactacctggccgtagttctgctggagctgcgccagctgcagccccagttcacactcaaggtggtgcggtccacagatggggccagccgcttctacaacgtcggccatctcaggtatgggtgcgtggcagtaggtgggacttgcataggaagatgagacctgaaagggtttggggggagggggagggtgtgatggtgaggacaataaatgatgcattagaggggctgggtggaaggacgtttgcacacaataagagagttcagtggcattttcagcctaatggcaaagtcatatgttggattgtgggcaaaatgcctgtgatttgtgaatggggagtgataggcaattcaaaatcttagaggaggatggatcaaaggggagaggggtgtggagcataaacagaaggtttctaaccttttcttggaggcacagcttccggtgagaagtcagtgaatgttactagagatagaaagtcactcccaccaggcttgtgggcaggatgtcccccttcctcctcctggctgtgcagagcatcagtggcacctcccaggtcctgtcagtaaccttgggaggctgttagagggggatgaggagacctttggctggtgccctttaacccctgggcttcagcatgctaggaaatgactagaagacccggccttgggaaaggttaggggtctggtaagtagacctcaggcttgagccaggcttcctggaagcagcttgtccctgtcatgtgtcctctccagccctgccgacctgccctgatgtgtcccttcccctgcgccccttgtctgtcccttctccctcccccctaccgtctccccaacagcatccagcgagtggcagtgtggatcctggagaagtattaccatgacttccctgtctacaaccccgccctcctcaacctgcccaagtccgtcctggccaagaaagtgtctggcttcaaggtgtattctctcggagagggtgagcggccctgctcctccgcccctcccggcctcttcctaaacaggactccaagctacttcccttgccttttcctttctctggcctgtgtcccagccccctctgttctgtcatttcccttgacttcaggtagctggtcttagctgctgatcctctttatgctacagtgtattccctggtttagcacctgtgtcttctcagagccctggtctctctgtccttcggccctgaactgcaaagccttctgcatcaggaggcttataagcaggacttctgcccttccaatgccttcctggttgctttcctgcggtttctcccagaggtggccaggagggctgggactgggaggcattgctgggtggtggggacatatcctctggatgtgtcaggccattttcccagagctccaacaaagcgcagaggctatactcttttattgaccatctcctctatcctgatcccgtgcagaaaacagcaccaataactccactggccagtcaagggctgtgattgcggcagcagcacggcggcgggacaacagtcacaatgagtactactatgaggaagctgagcatgagcgcagagtgcgaaagcgcagggccaggtgggtaccggctgtgtgagttcagggcttggtaatacccgagggaggggaagagccaacagaaaggggatggggtgcctgtgggatgaactggggagaggaagtccaagaggctcttatacctgctggaaatagagcgtgatgatagaacagtgttttgcatattcattttctggtgcttccgtgactggttagcacagactcagcagcagtgaaatagcacatttactatcactctgttccatgggtcaggttcaggtgttctggaacatctgcttggaccttgaaggctaaaaatctgtacagctctcctctgagcctgggcttctcttccaagctccctggcttttgatggaaccactttcatgtcatgtctccccacagtttccagctttttctaacaggagcctactctttctgacttttgtcatctgcagggaagactagtttttcaggcccaaaaggataattatctgttatgtgtgtgtgtgtgtgtgtgtgtgtgtgtgtgtgtgtatgtatgtttgtgtttggatgtgtgtatttgtatgtgcatacatgtggaggccagaggacaatctgagctattgttcctcaggtgttgttcactttgtgttttgagatggtccttcattgctctggaactcaccaagtaggctagactaagctggctgaccaccaagtcccagagatctgctggtctttccttccctggtgctgggattaaaagtgtaggccatcatccttggatttttttttttttttttttttttttttttttttttttgttgagacagggtcttactatgtagccctggctagcctggaacttactgtgttgctcaggctggcctcaaactcatagagatttgattgtctcttcctctccagagctgggattaaaggtgtgtcccaccacacctggcctcttttggtaaattcttaaatgctgtcttcacttttctctttgtcataagaacttaaatcatgctggaagaatctttctcaatgcctgctgttgccaggctctacctggagcttccaggattgcaccagagaagagatgagcagaaatgtggaactagaacatccaccccgccgtctgcctacttcctattctaggcttcaatgcagagaggcaatgcagtcttggtcttaatatagctggtgtcccctggagaacaaagaccaccagttctaattctgtgacattccccctggttagggtcctggatatcttggcacatgggtttatttcctctccccgttatctcgcttgtagctgataggaaacgttagttcacctgaaacaaaaagatcttttcaaaagaaacttggctaagaaacttagggaggcaaaaggatgcacagaaaggagacatgcagacagattgcatgaaccagcccagagttccctcatcagctcatgggaggtcctgaggtgtctgattctgggatatagacctcacatcctttcttgtcctgtcactccaggccagtcctactcttagggcagtgggttttattttggtttttggacttagagtacagaatatttcttactgtcctcagctctgtggtcctagtttcttcgtagtctttcttcatctacttgagtctagtttgagttccttaaaaatctgcttgtgtttttgtacaaatgatgagttgttggtttgttggctctgtgtagttagtgtagactgacttttgttttgtttttgtttttttttttgagataaagtcatctatatagccttggctggcttggaactcgttatgtagacaggctgacctcgaattcatacaggtcttcctgctagactgagttttttcttcttcctctttaatgtattttgaggttcactcatatgttctgtatgccccgttcatggcatgttgttggtgcgctgtaattcatagaatgcctctgacttcctatccattgttaggattatagttggcttcctttaaaaaaatttttttttttaaatttttcgagacagggtttctctgtgtagcagtcctagctgtcctggaactcactctgtagaccaggctggcctcgaactcagagagatccacctgcctctgcatccagactgctgggattaaaggcgtgcaccaacactgcctggctggttatctttcattttgatgaagaagcatcttattaatgttttatttatttttaaaaattaaaaatattattttatgtgaattagtgttttgcctgcatgtgtgtgtaccatgtgtgtgcctggtgcccagggaggtagaaaaggacatgggatcccttgcagctggagttacatacatctgtgaactgtcgtgtgggggctaggaaccgaacctgggtcctctgaaagagcagctggtgcccttaaccactgatccatctctccaaccccttactaatgtttactttgtatctctacttgcctagtttctttcaggtttcatatgaatcctttacttccttggtctgattttatttgaatttacttagttttttgaaacagtctcactatgtagataagcctggactggatctgtgattctccagcctctgtttaccaagtgctgggattataggaatgtgtcatcattcctggctcctttgcccattaaaaaaattacatgtatttgtttatgtgtatatgtggccacacacacttcagggttcgtatggaagtcagaggacaacttttgggtgtgggttttcttccactatgcaggtctcgggtacagaacttaggttgtcaggcttggtggcaagtcccttttgctgctgaactaccttaccaacctcttcttttattcgttattttaaagattcttaccctttccttcctgatttgtagtgaattctttgtatatttcagataccagttctttgttggctttagctgctgtagataacccccaccccgcatctgccccagtcaggtgtcagccctgccttgctactgtggctgaatagaaatgccatttccagagccaggagtaaaggctcttactgccaagcctgatgacctgagttcaattcccagaatctgtatgtgggaaagagagaagggacttctgtaaccttcacagaaggcatgtacatgcccccctcatataaataactgtaataatgataacaaataatgatgatgagccatttcccttgactcatatctatcaatttttgtatagtgtagtgtggtgtggagtcttttcctagggtcctatgggatacttggccttctcagtacatagttcctaggtgtctttctagatttgatgctaggccttttcactttaagtccctagtctgagtccactgagttctacaacttgttgcctgtgaggaaaacaccgatcccatctcctaatccccattggagcccttggctccaaatgggcctcagtcacttcagggagagcagagaggcctgacctcactgtggctgcaacagtcagagccagtgaatgggtagagggtaggatgagcagtgggcatgtgctgcagataccgcctgtcccccaggctcgtggtggctgtggaggaggccttcactcacattaagcggctgcaggaagaggagcagaagaaccccagggaggtgatggatccccgggaagcagcgcaagccatctttgcgtccatggcccgcgccatgcagaagtaccttcgcaccaccaagcagcagccttaccacactatggagagcatcctgcagcacctggagttctgcatcactcacgacatgacgcctaaggtaggcctgctgcttccagacttttctctgtgtccagcgtctcgttccttttgtccttggccattttccctgttctctcctcactcaccttccctctctttgtcttctctgtaacctcttttctcatccccactccatctgtcctgtctgtggagtggaggaggcaaggttaggcttcggaaccatttggggcatgtcagaggcccgtttctcttctttataaggctctggaatgtctacattccaagtctcacctttaacctcctgactcttcgcccacaaagtaagcttttgcctgtgcttccttttagccattgcttacctcaacccagctgccagcttcctagaatggctttctcggagccttctttggggagtgggtgataaagaggctggggatgtagctcagtgctctagctgagttcttgatttcagttaccagcaaaaacatgcacgcgcgtgcacacacacacacacactcgcatacacacacacatgtatatacacacatacacagatatgcatacacacatgtatacacacatgcatacatacatgcatacacatacatgtgcacatgtgtaaacacacgtaaacacacacaggtatatatgcacacaattttgcattggaatctttgcttggcctacttccctctgcgtgcagaactacatggtgctaatcatataagctgtatggaagggaaggaaggaagaaggaagaatgagggtcgagttgccctgggaacagcctggcaaggatgggggtgaattctgttcctgactggagctctatcacgtctgtgcatgccatcctcctcatctatacatcaggcttctctcaggccctcttctgctcttgcatttgaagaagcttgttcacgtggatagaatgagctcgaaacatcttggctaactttggaagctttgtggcaaggattgaaggatgggtgggcaggaaagatgcccaggcagtgtcttctcccttcctcaggccttcctggagcggtatctggcagctggacccaccatccaataccacaaggaacgttggctggccaaacagtggacattggtgagcgaggagccggtgaccaatgggcttaaggatggcatcgttttcctcttaaagcgccaggacttcagcctggtggtgagcaccaagaaggtgccgttcttcaaactctctgaggaatttgtggatcccaagtcacataagttcgtcatgcggctgcagtcggagacctctgtgtgactttgcagcatcaggggagggggatgtggggttcctgcagagtgctctgtgtgactttgcagcatcaggggagggggatgtggggtcctgcagagtgggagtggcttgggtctctgaccctgtcacatttctgccgccctacttcctcttgctcttgtttttgttttgttttttacttgaattaacttatcctatatctggtctccacccctcttccccagttttcccgtgtaaatctggagagaccaccttgctttaacagtatctgggaaccaccctgccccccaagtttgtatcattccaggctctgcaggaaacagtgcctcttacccagttcttccccagagtgtcccctggatggaagtcctttctcaaagggcacagggccttcttgattgtaccctaaccctaagctcccacttagcaaacctaagttcttagagccctgctctccagtggaccctaatagggtttctctggggggcacagctttgaccccagagagccatggtgccaaactcctgcaggacagcagctaaccttattctctgtcccctcccatagccctgaatccctgggcaaggatgcacctgtgacaatagtcccagcattagtattttccctgcagtgttactagcttccctttgttacagctgtactttcctgctaaacacacacacacacacacacacacacacacacacacacacacacacacacccacacacccacacacacccacacacccacacacacacaccccaagcaggaagtcccatcttctacccaggagtcttcactgctatttctaacttgtgtgagcacatgatcataggcaaactgctttgaccacttttccagggctgtggacaactcctgaggggaagggcaggatagacccctgaggttggagagacccttgtcacttaccctcatcctttctgagccgttcattcccacccttacccgtgaaggatgcatgctgacttgatgatatgcggaccccgaccaaccctgtggtctaagatatttttcttttctgctccagctaccccagtcctgctaacttccagctctagagacctgtggcctcatctcttcttaggggaagggccagcagctccttttcatgccctgccttaagtccagttctttgcctcaggggtctcttttccatggccttccagggtcccatcctcttctccctgcctcgctttctaggctctgtattggagtgagggaccaggattcctgccttttgtggctcctcaccccatcttaactaacagagtctttgcaccgaatctgaatctcagtaatttaaagctcactttgagcaggattcactaaccctttcttggatattttcagagccaatttgagcctttaaatcagacacctttaaattattttttatcacaaggaatagaaataggaaatatccacatccatccttccgggatccctgtggaggatggtcctgagggctggggtggagcaatgcctctgggccacttctgtaaaccagtcccaaagcccctgcataggccctccgcttccctggaaatgttactggcatttgctgtgccaagcacacgccgagatttgatccccattgatctcgatgagaggctgtgggatccacagcccacctaccccttactaaggggctcatccgttagcgcttattttgttcccacgggaatgggcttttagagctgacttagacagggcctcaaggtgagcctagggctgtggtagaggttcctggatagactccagagaaataaatctgtacgtgggtcatgggatggtatcttcttttttttttttttaaaaaaaaggaagaaaatcaggtttcagaggagtcctttttgggtcccgtgaatacttcactaccctggaatagcagggcctggatggtgattggggttgctgcctttgtgggcaagaatggggtgtggttgttggtttgagcagtgggcggggggtgggcagaaggaaaatatttgggatcttagttgatgccctagggttaggggcatggagtgtttattttaagaacctgccatgtttttaaatcactgtgatattttcattccttttccctaaaacgaagagaaagagtttccttgactccctgtctaagcactaagggctgtgactaagaatggtagcgttttggtcctttgtgtcagaactgtggtatctttgtctacttcggttgttattaggttttaaaatgtcaggatgaattgtcaggtgtatagctctgtgcgtgcgtgcatgcgtgtgcgtgcgtgcgtgcgtgcgtgcgtgcgtgcgtgcgtgcgtgcgtgcgtgtgtgtgtgtgtgtgtgtgtgtgtgtgtagagagagagagagagagagagagagagagagagagagagagagagagagagaggagagagagatgtgtgtctgtgtgtctgtcttttgcttctccagaataggacgctgtcttcatgctgtgaactgctatgggtgggtagctgactcagttcctctgagcagcccctccccctccaatcctgccccagcactcactcggttctattcttccactgtaggaatgtgcctacccagcccagcgccatccccataggggatgctttgctgggctacttcagtgcgcttgtttctctgtctgtgtggcatcctagctcatctccactgcacaacttggcctttgttttgatgaccttggagtgcttacctctcttccctccacaccaggacaccgtgcctcagtccttcacctacctcgccactctgtcacttgtccccattggtccctttctagtttctctttgtttttatttatgtccctccaatctctctcccttcgaaccccttcctcccatctcttaccttatgcttttgctcctagccagccacagcgttcccacagcaaaccctgatttaaggagacaggattcctgggaagtcctcacaaacaaatgtttgtttcccagggtttgtgctttccctgttggttggatctagctctcccttgtccctccccggtgtctgtcaacccccccccccccccgttctccctgtggggcaacatctactgatggattctgttctgtgtgtgattgttgtaatttgttcttctgtgtgcaaaaggaagggacttcttgagtctcttccaagtgagattgtaaatgtagaattttccatggttggatctagacttttttaaattctgttttcttcccccctttcattttatcttcctttctttcttcctttcttccttcctccctttttctttccttccttccttccttccttccttccttccttccttccttccttccttccttccctctctttcttcctctttcttcttggttacagagctgagaccttgtgcatgcatgtagaaaattgtaaaatgtaaattttttttaatatataaaaagcttgtttttacagtttgcagtggattaaacattatggcaattttagggattttttcttaaacataggaactaaaactgtacaaattttttttatatataaaataaagacatttgacttttgtgggggtattctgttgcttttcttttttcaagtgggactaaaggtggtcaaggaagagagaatatgttactgggcagtagggggcagtgtgagccttgtcttgccacaggccccaggcagagtggagaagaatgaggggagaaaggaaactgcttgattctgagcagagagagctgcaatggttaatcttttggggggatgaggagagagggattgctttcagtctgtgtcttccctagtaagcttgtgtgtgcatagtgtccaagtgaaggactggagtgggcgttccaaaccagaaaatactgatgtcatggctcctcacatgttttatttataaaagtccccaaacgtcacccctggttgtgtttatttttaaaagatggaatcctggggccggagagatgctcagtggtaagagcactgttgctcttacagaggactgagtttaaggcctgtgagaaatgcagccacacacattttttctttttatttatttttctcttacataatacaccccccactacagttttccctccctcacctcttccagtccttttcccccagttccactgatcctctgtttcccttcaaaaagagtgggctacccagagatatcaacagaaaacggtataataagctgcaattaagactaggtacaaatcctcatatcaaggctggacaaggcaactcagtaggaggaaaagggtcctgagagcagtaaaagagtcagagacacccctactcccaccgttaagagtcgtataaaaaccacaagctaaacaaccataacatttatgcagaggaccatgcaggctctgggattgttgctttagtctcggtgagcccttatgagctctgcttagttgattctctgaactaattctcctggtgaccttgatccctttggctcctacaatctcccccgccccttgagttcctcaagctccacctaatgtttgactgtgagtttttacatctgttcccatcagatgccaaaggaagcctctctgatgatgattgggctaggcaccgatcatgtttgtctttctgggttatataactcaggatgatatctttttctagttctattcatttgcctacaaatttcatgatgttattttttctaacagctgagtaatactccatgtgtaaatgtaccacatattctttatccattctttgattgagggtcacatgggttgtttctggctattatgaataaagccactaagaacataattgatcaagtgtccttgtggtaggatggagcatctttagggtatatgcccaaaagtagtagagttgggtcttgaggcagatcaattctcaattttccgaggaactgccatattgatttccatagtggctgtacatgtttgcacttccagcagtaatggaggagtgttccctttgctctattgctctacatcctcaccagcatgaactgtcgcttgtgtgattgatcttagccatctgacaggtgtaagatggtctctcgattttgatttgcattttactgatggctaaaaaactgacatgtttatcagtggaattgagtcaaagactcagacataaatccatatacccgtggacacatgatttttgataaagaagtcagaaatgcaaaatgggaaaaagaaagcatcttcaacaaatggtgctggtctaactggatgtcttcatgtagaagaatgcaaataaatccatatttatcaccctgcacaaaactcaagcccaagtggatcaaatacctcaacgtaaaaccagatacactgaacctgatagaagagaaagtggggaatagccttgaatgcattggtacaggaaacaacttccataacaacatcaatcataggcactaatgtcaacaattaacaaataggacctcatgaaactgaaaagcttctgtaaggcaaaggacagtgtcattaggacaaagcagcagcctacagaataggaaaatgtttttaccaactacacatctgatagagggcatatatatatatatatatatatatatatatatatataatatatatatgaactagacatcaacaaatcaaataatccaatttaaaaatggagtacagatctaaacaattctcaatagaggaatctcaaatggctgagaaacacttaaagaaatgttcaaaagaaaaatcttaagagagaggagaaaggtcttactatgtaccccaaactggctttgaattcccggattccagatattctccctcgatttgtggagtgtttcattcagtatcgcacctgggctgggcagtggtggagcagctgtcaatccctgcgctcgggaggcagaggcaggcagatctctgagtttgaggccagtccggtctacagagtgagttcctgaacagccagactacacagagaaaccctgtctcaataaatactgtgggataacttttttgtacactgttaatatgtgtgacttttccttggttaataaagaagctgctttggctaggtagcaaggcaggatacagctaggcaagaaagccaaactgaatacagggagaaagaagggtggagtcagtgatgcaagccagctgtccaagaaacaagatgccagcaggctggtaaatgtcacggccatgtggctatacacagattaatagaaatggattaatttaaatgtaagagctagttagcaataagcctgagttataggccaagcagtttgtaattaacattaagcctctatgtgattatttcggaactgggaggccaggaaacaaatgccctgccttgatttacatctgatgtccaatgagggtcgtcacgtaatgagggaagtctggggattgtgttaccttttattaatatcaaaatgggtgcacaatgattacaagacagaatgaggaatctgggctgtgtcaccagctgctccactgttcccactgggagaccagctctcccctgctgctctgcaaccttgttcccaaaagacgatggggaactctaagctgtggcttgctgagagctcatccaccatccttcaattcctgattgccctgctctcacctcccgagtgctgtgtttataggcctgcacaaccatgttcaatctaggtggccctaggggttgaacccagggctttcatggatgctgggcaagcactctaccaattcagctgcatcccagccccttgcttctcctttaaaatgtctttcttatgtgaacacaaaaatacttctcttgaaactgcatcattgtagaagaaaacttctatttactgttttcagttcacctcacagtcaaattttgacttactgtgaccagatttctacctcaaaaatttgaaattattgaaataaaaaataaatgccttttagtacactaagtttttgtttggtgacttgatgtctggtactaaagtattttaccttggctggtaaagatattggccgtgatactgctctcaccgaactgacctgtgtggacctttaagcagtctctttaacataatggacctctttccttaaaagctggtccaggcccagtggtggtggtgcacacctttaattaatcccagcacttgtgaggcagaagcaggcagatctctgtgagttcaagaccagcctggtcaacaagagctagttccaggacagcctccaaaagccacagagaaacactgtcttgaaaaaaaaaaagaaagctggtccaggctgggtatgggacaccatgcttttagacccaccaccctggaggctgaggcaggtgaatctctgaatttgagcccagcctggtctatagagcaagttccaggatatccagggctgtacagagaaaccctgacccaaaaaaaccaaaaaccaaaactaaccaaaaaggctagtgcaggaagtaatcaacttaaggccagagctcaatacttgtcaggaagaccttatttagggatttgctaagagtgaaagtcatgatctcagccatttgtcacgtaaacaaagcatatttgtaaccgttagctgagaaggtacagtttggaagcactttatctatcactgaagaagataggcactcagcttagcggattgtcaaggtcatgaccaaactacttgatgttactgctcagatgtgatgtctgtagtctttggctttgcaatgtagctggaaaaaagaaatagccggctgcggttcttggtgaagtgacacgttgtgcctagttcttagtgatttggtacttgtgttttgggggagcaggacagacagttcactcctttctatggagatgagagctagctactgagagctcctgattttatttatcagtctaagcaagtgatggaaagtctcttccaattgctgggaaggttggatgggagaaagtcagcttttggaaaaccactgcagcattagtgtatttttaagtggtaagaaggagggagggagggagagagggagaaatccagggcacacggtagatagcgctctgtagctcgtcatcattttaaatagcgagtaaaatggtgtggaatattactttaactaggtaaagatgtgttgcatttgtttttgctacagaatattactttacatgtgtaaaggtgtgttacatttgtttctgctgtctctgttaacgatgtaaagatgtgttatattcggttatactgcatttattaaactatgtaaagatgtgttgctgtttcatcttgcctacctaaagcacaggattgatctaataaaaagtggaatggccaataactgggcagaaaaggaataggcaggactggagggcagagagaataaataggaggaggaatctagacaggagaggaagaactaagaaaagagagggacacatcccgggccagaagccagacaactaacagccagatacaagaagcagtgaaagtaagatatacaagaaggataaaaggtaaaagcccaaggcaaaatgtagataaagaggaacagattaaaataatagctaaactaaggactagcattaaaaactaataataagtctccgtgtcatggtttgggagttggttggtagccccaaagaaaaggcctgctacaatggaaattattacaaagggcaggacagacataatacgtagtaaacgccacatttaagtagaatagggggaaaagatactggtttagatgacttatgaaacctgggcaatgcaacggattcttacctcagtaagttttgggaagacatttgtttgtactagatattgggatgcaaaggtaaatcaaacatcactcccattccctaggagcttccaggacttttgctagcacaagtggggaagtgtcattttgtctcctgttgacaactaaggaaacacattgcattctccctacaggaggtccatggcataggcacaggccgactgaagcaagcagtgtgtgagtgtgtaaatcttgaagccactccttgcaaggctgtctgtactctggtatcttgtaagaggatctgtggctgcaaaggttacaatggacactgatgacaccctgtggaaggtctcaccatccagggggagcagaaaggatatgtgatagatagggttttagctggggggcggggtggtagtaggggaggacgggagggagagggaactgagattgtcatgtaaaacaatcttgtttctagttcaaataaaaaaatctgccagagagagagagagagagagagagagagagagagagagagagagagagagaatccgtggctgaaaaaagtttggatatggttgtatcttattcatttttgcttttgcacagaaccagtctgtgttgcttgcagcatgaccagggcaaatatgtggttaaaactggaaaagtaggcttctttctagggcagtgagactatgtatgttactatagtggtagtgtatgttactatagtgaacacattctcatactctgttcaaatccataatgtaccgtaacaagactgaaccccaatgtcaactatgggctttgataatgtgcatcgttgtagggttaccaattgtgacccatgtccgccttgagtacagggtgctgaacgggggaggctgtgtatgtgagggagcagggggtggggtaaggaaaatatctgcattagattcaattttcctgagaaatcacactcttagaaaactgaagtctatataaaacacaaacaaacaaaaaaccctaagcaaaacacccagtacagccatgtgtatgtagttctagacatggaagtgtaaccggagcatctgaagagggaaggttgggcctcgtgatgtaccacagatgccaaaatttgcatgagtctcactatgctgggagataaggtgggtagggctgggtcttgccctttacaagttcccgttgatgttagttcccactgacactttaacatgtaattcgagggtggaatagactgggagagtttttatagtctagatgaattccagtggggggtgttatcttctgcttctgcccttatctcctaacacagtaccttgccccacaaagatggggtcaacaagctggcaagaaagcaggcacagctaatgtgtagatttcgcttgcaaggactgctatggaatcaattggtgcctcttttttttttttttttttttttttttttttgagacagggtttctctgtgtagctttggagcctgttctggcactagctctggagaccaggctggcctcgaactcacagagatccgcctgcttctgcctcctgagtgttgggattaaaggcgtgtgccaccaacgcccaatcggtgactcttgatttggagcatattaaaaagctggacacaaggaatctttctttcatgaattgaaatgttcagttggttttattctaccttgaaacagctcccccaagtagtgtctcaatttgtcactgtgcctatgacacataggcagatcactccagcaccttctgggaatgcagcttctgactctgtgtagccctgactatcctggaatttgctctgtagaccaggttggcctcgaactcagagatctgcttgcctgcctgtacttctgggattaaaggagtgggccgccgccaccaccaccaggctgggagtatacatcttgagggtctggtgtcttagttggcttgggttctcatgacaaaataccacagattgggtgacttaacagaacttcttaatttcttattgttctggaagctaaaaccttgtatcacgttggagagagagagagagagagagagagagagagagagagagagagagagagagagaaagagatagtttctgatttctagccaggtcactaatactatcatgaggcccctctttcatgccctcatttcctcaaagaacatcaaattaggtgaggtttcagcatctggattctgatcacacagttcagtctgcagtgccgggaaatgctgttagtcagtccttacttagagtggcaaggccctaagaaaaagtttatgtacacgtgaagtttaaggggatcaaacttgccttaataagaaataatgcttgacacaagaggtcaaaattgtttgctgagtgtggatggtgcacatctgtattcttggcatttgagaggctgaggcaggagaatcactgtataatgtctttcaggctagcttgacctatctcaaaatacaaaaattattataagaaagcctcataactataataagtatctcagtaaagtcactattgctcatgttatatgattgcataaatgcatcaaattgtgatttctgtgggactttaaaatgatacattgtaagatggccttatatgtggagtttatacaaaagcataatggttcaaataagagccatgatgctgggatttgatcactgaaatcctctgcctacaggagacctgagttagcttaccagaagacacgtgtggcagctcacaagcacctgtaactccaacccaggggacctgacaccttcctctgacttccacaggcaccgcactcacacacacacacacacacacacacacacacacacatatacacacatacacatacacacacatacacacacatacacatacacacacatacacacacatacacatacacacatgcacacacacacacaatttaaaaagttgaaaataaatcttaaaaaaacaccatgatgttaaagcagcagcttacatactgtgtgatttatcttctgccagaaacttcttgtcaacactactgatagaacaaaagggtattcgggacttctactatgtttaaaggattccagatatttatagttattgcaataggtgcagaatgaaagtaaagacaggacaggcagaattcccaagagccccaggaccagcaagcctggctatatatgcatagtggaaaaacaagaggagaccctgcttctgggtggtggtagtgctcacctttaaatgctagcagttgggaggcagagtgagttcaaggacagtctgttctccagaacaaggacagctagtactatacagagaaatcctgtctcaaataaaccaaaaaccaaaacaccaaaataaaaaactaaaaaaaaccccaaacaaacaaacaaacaaacaaccagacaagaaaagaccctgccataaataaggttgaaggtgaagatggatgcctgaaattgtcgtctgaccacttgtgtaccatggcacgtgtgcaccctggtatgagcacacttacactcacatgaatgcatgcacaggtcacacacacacacaaacacacacatacacataaacacacatacacacatacatacatacacaaacatacacacacatacacacatacacacacatacacatacacacagacacacttacatacatacacaaacatacacacacacatacacacacatacacacatacacacacacacacagacacacatacatacatacacaaacatacacacacacatacacacatacacacacatacatacacacatacacacacatatacacacagacacacacacacacacacagacacacacacacagacacacacagacatacacagacacacagacacacacagacacacatatacacacacacacacacagacacacacacacacagacacacacacacagacacacacacacacagacacacacaccccaaaataaaacaaacaaaaaccatcctttttggtccaagagactttatcctttgtgttctgtgatgatactgtccaagtagttgctaagaagtgagtgttgaagtcgcactgaaccttacaaggttgctcaaagatttcttggcattagaaccaagaatggcatgttattaagaccagtgatggtgcaatcatggtccttcattgaggccctgggaagggagagagatactaaggagagatgctttcgaccttccctttggcaatcaggtcacaaccctttgttcacttataaaattagtgttttcaacaggaatgcaggagtgtggagcttcaagctaacccccagagacacagaagcacagggctaagacttcctcaggacagactttattcaggcaccaaagggagggctttccctgggacctcagtaagtttgccacttaagaattcaacatcataagcacctctggggcgcagtgtatcacagacaggagggctgggcaggttggtgttttatttaataattatgagttaaaaccttaactactactgtggccctcatccactgcagggtaattattagatccaaataatagccaacagcctagggatggctgaagaggaccaaagtgttcattaacattttccaggtttcccatcactggcagcttgttactcccagttcatcagttagatcctcttaagtgatatgggatgatatctctcaaatttaccttcactattaccatccaagaatgaatttacttaataggtaaataagaatgtgcttgcctagactctgggtccccggcaccacaaaaaccagactcggtggcacatacctgcaatctggcacatacctgtaatctggcacgcaagaggtggatgtaggaggatcagaaattcaaggttgtccttggtcaatgtaaagatttcaggtcagtgtaggatacatgagaccctgtctcaaaaaagtgcttcatatggtactgaggctgggtccatggctgggtcgtaactgccagtcagcactagataaaccgctaagaaggtctttctgctggaccacactttaaagctagggctcaccagaatcacaaagcaaaaggcactgatcattcatgataagtcaagacactgtgcacagagtcacatatatctctgtaagtgtcttgaaggaggatcatccggataaaagaaaaatagtgagaacactatttctcagagtacacgctcagccttagtattcatggatttacttttcatttgttttgtgccaagagttcactacgtaactttgcaggcctggtacttgctacgtagaccacacaggcctggaactcacagagatctgcctgcctctgcctctcaagactgggactaaaggcaacactaccactcctggcttttagtgtttattttgttctgagtttattaaatttgattataatttatggtgggagctgccagggggtaattttcatgtcaataaagggttagctcaacaaaacagtgtctcagaagctagactttaatattggtggcatcatagtttaggccctaagtagttcttcctatgctgtgaccttttaatacagttcctcatgttgtggtgaccctaaccttaaaattattttttgttgctacttcataactgaaattttgctactgttatgaattgtaatataaatatctgatatgcaggatggtcttaggcgacccctgtgaaaaggtcattcaatttccctcaaagggcggcatgacccacaggttgagaaccactggcttaggggattattattttaaatactggctggctgggagctcacagagatctatctacctggcactgccttcccaagtgctggaatcaaaggcgtgaatcactgtgcccagcaacatgcctctactattattatttttgtcagcatacaaagtaatgggtttaatgcaaaattgtcaaacatactttatattttgttcctgttgttttaagactaagcctgttgagactcgggattgtaaattttcttattcttctggatatggactgaactttccaccttttatgcctcctgctaacgcagtagggtggagtagttgggtggggtgggagctgttgttacagtccatcctgttttcataacatgtacctcctatttcctatgtgttatagaaatagtttgtaaaacttttttgttttatttttagttgtttcagagtagaacaactgagccgtttgctagccctggcgaggcagaaagaccccttagaagaaagcagccttgcagactcccagctgctgctcctggtaccctggaagtcttgcctgaccataccttatctttatctgtgattacatggggttgttaatctttaccctagtggctagggagctcagttggtagagcggaaaagactgtaggttggctagtagactatctcttaaaaaaatctcttcttaagcctaagtcacgaaggtattctgacttaggtggttcttttgagatcttatatagagtcttttcagatcgtcattttgacagcattcccggaattcagtgtcatgcaggctgacaagtagcagagatggagacccactccttttaatgtgatttattaaatgatacaaaagttacaatcctctcccctcccctgccacctctgctgtttatcaccttcctgttgacttttgcagtctgagtcatcagtgttccctgtgcaaaagcgagagtaatggaattgctaattgtgtgtccattctttcttctttttcatgtattgtttccatgtggtcactttgcaattatggtgtcttgaggacacttcaacacactcagtatggagtgcttcttaacacccccaggcagctgaggcagatatcacgattgggaggactcacaagttccctttcacactgtttgccagcctgccatcaagtcaaacaagtgcgagtcacctgctttagatattttaaggagtataagggatgatttaagtcagcaagctgaggattgtgacagcaaaccaatgagtagtgcatgtagaagttgagtactggtcatagatagaaaatgaaaatctgggcccccctccccctccccgctgttttatgtgtgtgactcagtgttggactacatgagcttcaatgtctttctaagacttcttaaaatacagcaggactctgctcccatcttcctgtgtggatacaggaatcttagcatcctttggtttcttttcccattgctccagatcttctcatagcacctgttcagattgagcactgaatatacatctgatttctttctgctttagggagaacagtacggatgcatgcatgtagggagaaacaggaaaggaactcccctgcttagagtaaatgtagagttgagaagcaaggatgaaggcccatgaagttgcctctaggagtcattgtgaggccctagggcaagataaggacctctgcaaacatgtttctttcacttacaaataaggaaagcacaatagcgattttgtttattatatgagcttgttgagaagcacaaatggggtaatagatatgcaaatgataaagtattgggctggagatgtagctcagaggtggagtgcttgcctagcagtgtgaggccctgggctatatagccatcaccattaccacagccacccaaagaagagaatttgaaaaatagaagccacatataaagctgggtggtggtggcacactcccagcactcaggaggcagaggcaggcaggcggatctctgtgagtttgaggccacgcctggtctacaaagtgagttctaggacaagctccaaagctacacagagagaccctgtctcaaaaaaaccaaaccaaaccaaaccaaaagaaaaaaaagaagcaatttcatagacactcattggataccattctggtcttggataccattctggtcttgctgcatcatataaggtatgccatcagcctcaaatagctcatgattggtccttaacttccctagaggtagctcagagtggcccgtgaaacactggtgtagaagcaaggaacctgtttgcttagtttctttaagcatgaacttttgtgtttgtaaaacgaagcatggtgaactggttagtttttgtcaccttggtacaactagagttacctggagagggggaatcctcacctgaggaattgccaccctcagattggtctgtggggaatcagttttcttggttaatgattgataggggaagacccagcccacggtgggcagtgccatccctaggcagatggtctttgggttgtattaaaaagcaagctgagcgagccacggacagcaaggtggtaagcagcatttctttgtgttctctgcttcagttcttgcctgaagtttctgtcttggctttccttgatgtaacctataacctgaaagtcaaataaattcttcccttccctaagctgcttttggctgatgttcttatcacagcaacagagaaacaaactcggaaacatgggaaagataaacccgatggttggtaatttccttctaaaactccccgagtctgcgtccttggacaaaccactagggttcctaatttctttttctttttaagtaggtaattgttaagggttacatgagaatcgtgtgaaaggactttcaaacccagcgaagttgtacaaatgtgatgtgtgcccattgctactgaccttgtctcctactccccagtggggatgggcctcattgctggctacagaactgccaagatgaaaacagagtcctttgttaaaacatttttaagagcttcagacatgggtcagtggctaaataaaaggctgaggcaaggagatcgtgtgagcccaggcatttagggcccgcctggaacatggaactaagaccctgcctaaatgaataatacaaataatgcataaatgagtaacaacagaccatgtgtgataatatttgtcacaaatccatgattccagatctaacaatgttgtttccagatgacaatttccagacacccagtgtacctgctctcctcgaagcctttggtggaattaatgaactttctccagtcttttcatacatctaaggcagcacacaggagccagccatgcaagatattagccaattaggagcaagtgtgacatgcgtcagatggggttacgtaagcaatcctggttttagattcttttttaattgcccaacagtagctttggttcacttcattggcaggctaccttgactcagtagacacagaaagttcttcctcgagtggctctgagcagtgcctgaacctttccatcagcattgtctaacgtcttattctgttgtctttcattttctacccagacatgctcctggctgtactccagctcccccttgtcttgaaggcaatgctccatcccttggcctctctgctgctttaatgattgcagttttcttttacttgtttcaaaattctgttttccttgcttgctaatgtaatcttcatcctagaaactgtcatatgaaggttcccccatccccctccgcccccactcagcagagctacttttgagttttcagaatgctggagttgggaccttttgaagtttgggcatatggagggcccacgaaaacatcagtgcttcaaggtgaaaaataattatgtgatgtatagacccggacaaggatgaaatgagttgttaaataagatagtcacttaattgtatcattcactgttgtatagctaggcttggcaacaactcatcagatattgtgtagaaatatgatcctggctgcccatgagcttcaggggctagagactgggccattctatggcagaaagcttgtcattggaccttcttgctttttcctatttttaaaaatccattaaactgaaaattggcatgaggattttagggtgtgatgaagtgatcagaaattaaattaagatggtgataatataactctaatttttaaaaaatttatccaactctggatgttgaattatgtggtatataaattatacctcaatagattttttttttccgagacagggtttctctgtgtagctttggcgcctatcctggcactcactatggagaccaggctggccttgaactcacagagatcctcctgcctctgcctcccaagtgctgggattaaaggcatgcgccaccaacgcccgactttttgttttgtttttctttttcttttcttttttttttccctttgagacagggtcttattatggagctctggctatcctagaactcattctgtaaatcacgctggattcaaactcacagagatctgccagcctctgcctgcctagtgttggaattaaaggcgtgcacaactatgcctggcttttaataagtgtttttcaattttatttatttattatgtatacagcattctgcttccatgtatatctgcacatcagaagaggacaccagatctcataagggatggttgtgagccaccatgtggttgctgggaattgaactcaggacctctggaagagcagtcagttctcttaacctctgagccatgtctccagcccttaataaatgtttttaataatgattttaaaggcatttatttttatcttatgtgtgcaaatgtttgcctgcatgcacatctgtgcaccttatgtgtgcatggtgtttgcagagaccagaagatggcagtgaatcccctggaagtggatttacagatggtagtgagctgtcatgtgggtgctgggaatcaaacctgagtcctctggaagagcagccagtgctaaaaatgctgagccatctctcctcctcagaatgcttcttgaaacataacagtcatagttttaaaagagtgcatttattttacactatgcatttttatgtttaaagtaattgagattctcttaagaaactaaatgttcaaagtaaaagttaaatttaaaacctggggagttatctagggcgtattaaaatgatacaaacttacaaaacttggatatgtatccccaccgacactgcttctctagtcgtttaaaaatactgttcattttaaatttcaacacattaaaatctatgcttatggtgtatagttttatgggttttcacaaaggaatacaggcataaaaccactcttgcaatcaagatacagaacaactctgccacacccaaatgttccctgggcctggcagagtggtacacacctgaaatcccagcacttaggaggtggacgtggaatgagcctgagttcgaagtcagctcaggttacacagtgagtgagatatcatcttaaaaagagtttctcagggccaccaatttgtaattaaccccctttctcactccaaaccccagttaatgctctgaattataattttatgtgttctagtacaatgtattctatgtacattttaaaaatatgtttccttcttttatttactatcattgtgagtgtgtgtgtgtgtgtgtgtgtgtgtgtgtgtgtatggagagagagagagagagagagagagagagagagagagagagagagagaacacatgtatgctgtgtgttctttcttctcctctccctctctgtctctctttgctttttttttttttttttttttttttttgagagatgatctctctgtcctggctgtcctggaacaagctatatagaccaagctggcctcacactcacagagatcctcctgcctctgcctcccaagtgctgggattaaaggcatgcaccaagacacctggtctttcaaagattttcaaatgcaagatatgaatttaaattttaaattacacaagaaatggttattttgggaatatggggatttcctgctgtcacctagtcatactgagaggggtttaaagtgctcagaggtctgcattagtctaacttcaggcacgttcatagaatcacaggctctcagagtcagccatcatcccacctatacatgtgaagaagtgtgagcccaaatttacataactagctatgaaggggaattccccagaactctttcccaagggtcaacctcagtatacttttgactacgactgctgagatttttattatcatctttccctgtgactgagttctagcaaacatccagcccctttctgcttcccttaccacatccctgactactaatgatttcaacaatacttggaatataccacgagtactggaaaaaaaaaacaaaacagtaagttattgttaatagttgtaccataaaacaataactcatctcacttgctacttttctattgctgcgataaaaagccatgaccaacttgcagaaggaagaggtcctttggcttatggctccagagagataggaatccatcgtggggggtcgggggaggcaaagcagctacagcaggaagctgagagcccacaacctgaactagaagcacgaagcagaggcagcaactggaaatgatgtatctttaaactcccaaagtccatctctagtgacacacttcctccaacaagactgcatctccgaaacttctccaaacagcgccgccaactggggaccaagtgttcaaatccatgggcccatgtggggcgtctcactcaaaccaccacactcattcattactcttacttaatgtgtgtaccacctaagagaacatgtgttctaaaacagtcttgtttaaaagggagaacaggaaagtccctctgggagtggttctgaagattccttgaggcatcccgagagtccccaccttggcacttcaggagaaggaagggctgagaggtatacctgtggccacctgattaaagccctgttaccattttcattcattcttttttttttttctaaagactttatttatgtattatgtatacaacattctgcttccatgtatatctgcacatcagaagagggcaccagatcgcataacggatggcatgtggttgctgggaattgaactcaggacctctggaagagcagtcttaacctctgagccatctctccagcccctccccctccccattttcattctttctgaagagtttcctgtaacatttcttgtagtgctaatatgctaatgatgacttctttctggttttgtgggtatgagaaggttgtttttgaaagttatcttcagagtctagatttctaggtggattgatgctgctgattgctgttgctgccacagtctcctggcttgaccggtttccacccagaagtcagctgtcacttttgtcgtcctttctttgtattcccttggcttcttccctctggtctccaaacagttttcttttcttttcctttcttccttccttccttccttccttccttcctttctttctttttttttttttttggtttttcaagagagggtttctctgtggctttggaggctgtcctggcactagctcttgtagaccaggctggtcttgaactcacagagatctgcctgcctctgcctcccgagtgctgggattaaaggcgtgcgccaccaacacccggctcagttttctttttagcaccggttttaagaaaataaaaaaaaatattttatttttaatttgtgtgtgtgtgtgtgtgtgtgtgtgtgtgtgtgtgtgtgtgtgtgtgtgtgttggagttttggggagtgtatattcatgtgtgagtgcaggtgcccatgcagtccagaagagggcattagatctcctggagctggagttccaggcagtctgagctgcataatgtgggtactgggaaatgaactagagtcctctgggagagcagttaagtgctcctagccactgagccactcctccagccccacatatttgataatttttattggatgtcagatatcatgacattataaaattttagatttgaactttttgcactcctttagataatttcgagtgttttgtgggaataactaatttacttggaaattgtttactactttgggatttgtttttaatcgatgctgggtgagattagattcagggatcttaatccttttgagtatatctgaacttatatctagaaccctttaattttgacctcacgaactttctttaacactgcatataacagatgtcttctaaccatgaatttttttgatctctatggcaaaatttttatctgctttcctgatgtattttctttggctagagctttagacttagtgtttttattttttaccttccttccaagactttaaagatgttgtttttctcctgtgcttcagtagaattttgcacccccaactcttcccacctctgggtgcgctccctgtctctttgttttccgttttcttttatccttaggttacttttaagattttcactttagagccattttttttttcaattttgtcttattacttggtgcagtttgtattatgtttctcttgtctgaagttcattgagcaccttagatgtctgtgtttggaactatatcaaatttggaatattttaagttattaatccttccaattcttattttgttcttccctctttgggggtccatttatattatattgtttaactgtgctattttttctttattcataatttagatggtttgcattgaataccatcaagtttactgttcatcttctgcaccagttaggtccacctagtgaatcttatttcagacattgtatttttcagctgtacagcttagtttgttttcacatgaacacaatgaggagagatgtagaatatttatatataaatgtgtgtgcgtttgtgtatgtgtgtgtgtgtgtgtttgtgtgtgtgtgtgacttttgcttttaaagtctttttattgaggcatcgagaaaggacactactcaaatcctttgttttgagaaagtctaagtgatggatgacttagcagctgttctctgaattcaccattgtgtctgtacttttaatgggctttcctagccggtgattaagtgtggtatgaatattaatgcaggcctttgctgcaagatgcagactcctttgatgggtgcctttgacttgatgactccccggtggcctggctaaaactttcttagaatggcacagcagtctgagacccagctaatctaatcctccctttcctctctttctcccaggggtcaaatctacaccacagtctccctgctttctccagaccttgttactttttccttcacaggcatcttctcaacccagctttggtatatgcttcttcgatgacctggattaatctatttattattgtcgttattgtagtttttatttgtaatcagaaaagggccttccagattggtgtttgaggactggtaatctacttttcatcattttaaggtcgagggactaaatagcaggtccttttaattcattaactttcaaggattaatttatgcttggcagtttcactcacatatagtacattctggtcacactcaccctccaactctctctctctctctctctctctctctctctctctctcgccatttccctacttttgctgagcccccacctcactttcatgtctttttgctttgcttttccccatgcatgcattaattaattaattaattaattaattaattgtgtatgaatgttggaagaggtgtgtgtagtcacaaatgtgcatgtagagtcaattctcccagtggggcttgggatcaaacccaggtctgcaggcctagcagcaagcatctttaactttggatccaccttactgattcttcccacgtccctttgttttgttttggtgtttgttttatgacccattggatttaaatggggctactcacatggtcacgggtgtgaagatacccactagaatatgggtaattgttcatcagctttcttgttgaagacaatactttcttcttcactagccctagattaccatttgctcctctggctagtgttacgagaggttctttgtcccaactggtcccgctgcccttcagccccaaatgaacacatggacgctatattaataataaaactgttggccagtggcttgggcttcttattggttagctctgtcataatattaacccatttctattagtctatgtattttcacatggccttatcttactggacaatgtctgatgtgtcctatcttcctggtctccacatggcgactgttctggtgggccctctctgcctacctttctcagaattccattagtcctagccccaccattagtcctgcctcattggccagacagggctttattcattaaccaataagagaaacatacacagaaggacatctcccatcagggttgggtgggacactgtaagcccctctcccacccatgactgcatgtttgtggctcagtcttgtgtgggtcctttgtgaataacaactgttgtgagtatttctatggctgtggcatgcacataagttattgtttcacagctcccagctcccttttctacaatgttcccgaaagcttggagggaatgacatggctgtcctatttaagtctgagcaccttgaccagtcactggtctctgagtttactgcttttcattactaagagaagcttctctgatggaagctgagacctgcactagtccggggtataaatgtatttaggaggcagttcaacaacatgtctatttagcaaagccaaaaatactagtttcgctcctggtgcctatgacctccccagtcatgggtctttgaccagaattacacaattggcaatgaactcccttctacggagtgagcctcagacataaccccaaatcagttgatgaatcccagaacagttgttccattattgtaccaataagcacttcatacctggaaaggtggtgttatagcttgaagagtccaaagctaggaaagacagttgatagctttccctatcagctgccttctaacaactcttggtacttgcaggttagacagcagagaggccgcttcctgttcagttccagcaagatttctctgcattctgcaattaagctgtatggagtcttcagcaatagggtcttaccatccaggtctgttgggcaaccaaggacaatggtcacaccctggacagttttaaggacctctggagccttcccagacagcaacttccagggagatggcctacacccagcactgcaattttagtttagtaacccatggcttcaagaattggcatcatctaccatgcatgccacctctactcaaagtcttcttaaaaaatcgttataaaattagcttgcacagtagtaatcctcatgtgactttgtgctacaactttagttttggttaaccctcctcctgcaccgatcttctccctggtttctctgctcccatcctctgatgtcaccactatttcctaactccattttcataataattcttctaccatctccatcccccttcaggtcagagctcgcttttgaaatgaattttcaaacctaaaacaacctgtattttggcaataatcaagtcataagggcttttttgtgtgtcaggggagctctccacaaaaattcaggatccccctctttttttttttttaaactaccaacttctttctaaagttaagcagtccacttagcttctctcagcttattaaagaggccaggctggttcttctctataagcctatagatgaaggaaaataatttacctgaccaattatctagaaacttattagggggaagcccactggtttgaattctttctcttttttaaattttttaaattaatttttttaagacaggatttctctgtgtaacagccctgcctatcctggaacttgctgtgcagaccaggctggccttgaactcagagattcccttgcctcttgagtgttgggattgaaggtgtatgccaccagtgttctgccttctttcttcttttgacaagcactcatgtagttcagactgtcctctaacttttgatgcccttctttctatgtacaggctgctgatcttgaacccctaatcctgctgtttctacttcccaagaactgtgattataggtgtatactatcacacttaagacatttttcttgtattgactattgagttgtctttaagaaaacatcccaataaaacactcaagatgaaagaagtggcctgaagaccaagattttaggaatcacagagttagggaaaattaaaaaaaaattattcatgggtattttgtctgcatgtatgtatgtgcaccatgtgtatgccgtgcctgtagaggcgggaagagggcattagatcccctggaactggatttacacagttgtaacagttatgtaggtgctgggaatcaaactcagttcctctggaagagcagtcaatgctcttaacttctgagtcatctcaatgggctgggaaaaaattagaaatggttggattttatttttctgcataagaaaaggaagaaatctagttttgatatcaggaagaaacagattgaagatagaaaaaagtaaaggactaaaaccattaggaaaatgcaggtttaaggtagaatatctagtttaaggttgctaatgtttcataaactaattaatcagaagtaggaatttagagattgagtgaccatgaactttgctctccaagaagatatctgaataccatagaggctagaatggaaactaacaaggactcaaaggctgattttgaaaaaaaaaaaagttaaaaagcactgtattagtcacttttccacaactgtgacaaatagttcagaaagacaacttaaaagaggaaagacttttttttcagatcacaattttagaggcttcagtagcccaaagggtagttggactcatcactgtggccctgagacgagatggggtgacatcccagagcagaagtgtttacctcctaatggatggctgccaagcaggcccccttcccaagaggtgcatggtgggtagggaggaacaagatacccttattgcttcctccaaccaggcttcatctttcgccactcctgcaatactattcgtagcttagtcccgaagaatcagaattagacagtaagaattagatggtaaaacttggttgctgaagataaccacacaccttggttgtaggatgcacagaaatcaaactgagtcagatgtgttctccccactagctagctttcagagtgctagaaggtgctattcaggctgctggaggagaaaaacaatcaacagtcttacttagctgtgagccctttgaactgtagtgctaacctatcaggcaagatgtgcctattggttgatagtggtgtgactgttatgaagatgatcaattgctttccatttagattggagacctgccccacagagggagttcatgattggtactgcaaaccttgtcaaaggctcatggatgaggagatcataggccctacacctaaggggaacctactgctgatgctttgctaaacagatgtattatctaaatatctcttaaatgtttatgtttgatattatagagtaggagcttttggcagttaatggtggctaaggaaggaacagttattttctccagtgttaaagctactgctaagttgcccatgctccagtaaataacctcatatccatgcccatggaagcaaccctagttaaaattagtgagtcatttgaaaaaacaaacaaacaaaaaaaccaaaccaacaatgatgggggaaatccttctgtgtatatgtttgtcttattggttgataaataatgcactgttggccaataggaaagcgagataggtggggctaggcatcgaggaggattctgggaaattagtaaagaatggagtccccaagtgatcccctggtgtcctctctggacccacttaacagagccagaattgagataagggtcaaccagaccacagtttgatccaggccatctaattatgcatcgctgttgccctcaagcctcagttcttccttcatcaaatctaaagcttattgaaatactctcaaaaccagggctggaatgtattgatgagctttatttcttaaatgtgctgataaaaatccctatttactattactttttccttttgatttctggagtgagtggtcagacctaatttgttgggacttcttgaagtcagatcctttatagcctaggactttggtaacagctgaaatatgtcttacatccaactgtgacctgaaatgtaacacataggaaacagaagactatttcttccatggaatatactttaggttcttcaaagactcctctgctggggacttataactctgtattataactctcatctggctcgatgttttctttaactgcaactcttttcctagtcttcatgggcttccatggagaggtgagctttcaaatgaatcccaccttggaatgcttacgctgctctgtaagaacactagtgtgtgcccatcctgccataggtggatggtcactctctttctctgcgctgtgctctcaagcgcattggctgcagcctctctcctgctgtctatactctggggatgtaggcctctcccaatgatccactcatgttttcaatgaagcctgttggttgacttgacatgatgggagtttcctttccccataggggagaggagtagaacataatattccaaaatgttctgccagagatatctttctccacttctcaacttgagttcctgaagtaggtgatgtactgacagtcacaacaccagctttggttgtagtctttaaataagagcccacaatttgtaagacagggaaaacttatagtttagattttggtttttgcagaaccagttaaaactaaatgagaaagaatcccatttaaaatttcatttgcacgtagactatcctacttaatcattaggtatgttgctgccattttgcacaaggggaaatgagacttatagaggctaagtggtttgtttgagatcacatgggcctgatttcaaagttaggctctttttctcttgctaaccataaattgactcctgtggagtcctggacctggagtctttggttcatgttctgaatcggtataaacagtcttgtactggagtctctgactcagttttgtgttcttagtctattcacctctggggccaagttttcctttttgtaagctgtggaacattagaataatactttaaaaaaaatctgtttcccaacagaactgcatggtgatgaggtgtgggggtgggtagagagggaaaaaaacaaccattagtagaactaaaatttatcgggcatctacaattgtgtgtcaggcaagctctgtgataggttatttacatataataatttattcagcattaataatatctgcagctggtacagaatagtcattggcaattaggatggtactggcccctaagggtcttaacagtagcgctgatgaaaactgctgggataggccaagtgccttacccaaggctagacagctagtgaagaaggcccatatttattctccgagccatcccacaactaagtgtgccctcttgctgattacttgcacactttagaaaaagtagctacacacaggccagctatcattattctcagaggcagttatattgatgccatttggacaccaggctaagagatttcatctttatggttacccttgcaaaagaccttttttttttcttaaaaacaaaacaaaaacaaaaaccaacaatacaaaacaaaaactttatttcttatgcttccagtagaccaacttggagttcagttagaagcttcatctcaaagctttatttcctgccagacacggtagcaaacacctttaatcccagtattggggaggcagagacaggcgatttctgagttcaaggccagcctggtctacagagggagttccaggacaatagcaactgtatagagacactgtctcaaaacaaaacaacaaagctttacttcctgtctttgatatagcatttctagtctaagtgcctttaaatccatgaaaacaacactcaagaaacatggggaacaaagcaagggggggggtgggcacatgagcagggctgggttcggatcctgaggctacctgtgcaatcaagataggtttacaatgactggaaagtttgcaaattcagaagtcatttctggcttcctaacagttttcaacatcaaaggctttggaggcctcagcagactctctcagcagttgagctgtgaaaatcatgaccaggaggggagacaagggtgaaaggtagcctcaacaactgcttgaggaacaaccagcgacaaacaggaagcatcgagaaggaaatgactcacaaaggaggggaagggtgctctctcacttttattaccccctccccccaccggagagtttccattagctttgctttcaaagctttccttcaacaaggcaaagccccccaaatcccttctgtgagggagcatcaccttttccacaaggttgtctttcattttgccatctcgtgaaccgtcctcattctgatgttatgtttggtgtttgttattattgatgaaaacgggatgagccaaagatttgttaatagattatttagaaactgatcatagttgctaaactttgtctaagaagtagaaggctcttgggcttgggaaagtctcagcccgctgcttttcttcaggtataggccacaaagcctgatctgaaatggaaacagctatttaatgaagtgttgaaattggcctgaattacagagtaatgagtatgtttcagttttccatggtgggtagacaaatattttgctggtaaaataaaaaaaaatcaatcaatcaatcaatcaatcaatcaaaaccaaaaacaacaaaaaaatttggttcataactgttgccaatttctgtggaagcagttctaagttactgggaaaagatgtccaccagtatatattgtttcattcaagcaggtatgaataacttcaacaacagcagtaggttccaaggaagaatgctttcaggaaaaatgatgctcagtaagaatgtccctctgcaggcatgcaagaatgaccacaaactctgaggatagtaacttagagcacttaaattttaatgtttcctattatttaaacatttttattgaatctttgcttctttgtttcttttctctcttttttttcacatatggggtgggaggtcagtgttgtgtgtcttcttttatcgtgcacctcatttttttttttaaaggtggggtttctcccttagtctggggctcattaactggttagagtggctagccaacaagcactgggtatctgcctatctaccctctgtcccagcactagggttatagtgtaagaccccgggaagctcaggcctccaggatctcagcccaggacggcggtcaccccaatcaccaggcagattcgaaagcttgttgcaaactgcatgaggctttattgtagttgtttaagagctaaccccatgatatctcgggccttccatccatccaccgtggtggatggctaggaaagacagctggaagcatctgcatagagatcttatagggcagcataaggggaatgtctagggctacacataggctcaggattggtgtgcctccaggcttggagggcttgccctgtgttgattggtcaactggttgttatggcccatagaccctcccagggtggttgctttgctctgtgtgtcattgctgtgcacttttccgtaaagcacacccagagccataaagcatagcgccaccagctaacttctgattggttccttgccacgaggcaggtatctgacctcctagtgaccaatgcaaggtcagacaagcatgtgttcagctgttatggctgccgaaatggggagctggtcccttcaatagatgtacccatgctgtgtccatgcctggatgctggggctctgagctcatgtcctcatgtttgtttggcaggcactttaccagctgagcaatctcccagacctgtgcttcctgttctgtatggcactttagattcctgcccttgtcctgagagcttcaagtgaaagtgagacacacagatttgtattggtggtcttgtattggtggtccttgtattggtggtccttgtattggtggtccttgcaggggcacagcctgtgtttgagatagaacagcctggtgagaacaccagcagaaggtgaaatggcaacagggattagaaagactataggcacagaaatttggagcggacacaaggtgaacataagcataatctcttttcagtgcttcagaaattcatagtcccagtggaaatgcagagtcccggtggaaaggcagatacccctcggagtatgaaaaagcattgaaaaactttatttagatgttagaagaaagataatcttaaaaggcaaaagacatggaaagatttggcttatctatttaagaaatgttttatattaacatagcttaaataaacaagtatgatacaaaaagttttgggttattattgtcattggatattaggagttggttctgtccttccaccccgtcggatctagggattgaactcaggtcatccaacttggtggaaggtgccttacctgtcctgacctttatggactgtaaggatggcatggctcgtgtatggaaagtatgacccaaaagctatgccagtaaaattattacatagacatcctcagactttgagaaatgttaagaagagcttagtgatgactaccatcatgtttatctaaaagctctgtaggagaggttcttgggtcatctctcagccctttgtttatagagaatcaatggtaattgtgtcttagaacatagccaaaatgaaacagctggttttaaagttaggagaggctctctcctctttttatttttggtttttcgagacagggtttctctgtattgcttaggagccttttctggaactagctcttgtacatcaggctggcctcgaactcacagagatccgcctgcctctgctcccgaatgctgggattaaaggcgtgtgccaccaactcccggctcaggagaggctcttataaaccagtaattagtattctctttgtagggaagaatcttatagagaatcctgatacactatggtaattagtagccacagcgacaaacatgactcaccaggaaatggtgaaatggtgttgttagtctattgagggttttcatcaaaatgattgttacaagaaggggttgctggaagaggctctgagaaacaatacgtggatcaatcacgtttcttaagggccctgtatgaagaaggtagataggtctattcatttttatatttgagttctaaaacacccctgtagccactctcctaattttccagctttgtttatattatattattatattttatgttaaccaaaacatctctgtgttgcctctctagctacactttcccctttaatactctgttcttatcccatctcaacttatttacaaccaaagcacaagaagtctacttcctgttcataaccctgggcctctctttttgtatcacagttctcaagtgagacagatgccttggatgaatccttaaaagctttcccattctcatgcacaatcagtttaaagccctgttgaagtttcattggctactttgttttcttctttgcttcctcctcccaaacttttgtgactgcttaattttacttcctgggcttttgaattctatagacatctgacttaaacacaaatatatatatatatatatatatatatatatatatatatatatatatatattaccactatgtagccctaactggcttggaatgcatgtagtccagctgactacacattcacaatctcctgcctcagtctcctaagtgctggtatcacaggcattcagggcatagctaatttgttacgataaatctttctgccaaaagccgccgagcccccgccacgtgtgcactttacgccagccgcccacccgagttaggcccaaattaatacacagagagacttgtatcaggttcaaagctgcttggccaatgactatgattctcatctgctagctcagtcttaattatcataaatctatatattttataagacttatcgggcaccttattggtgtccctccttgccagtggatcacattgcgccactggagaaagagtggaggggaaaaaaggggatatttcctatttcctttgcttaaatatgagtctccttgctatgtcacttcctgcctggatcaccacttctctactacatttcccagaatcctctttgactcctagtcccgtctaacttgctgtctcattggccaagcagaacttttatttaacaatcaataagataaacatacacagtacattccccatcatctcctcttttctgtctaaataaaaagaaagataacttatcttttataataactgaagaaaactataaccgtaactatctgtcttcaactctatcaaagaccacagaaagataatatataaactctagaattgacagagacatctagctacctggacagtcacccaaagttcctctgtaacgttggggtatccatcttcagcctataggccacagtgtgtctagcacacttctccatttcaacaggaacccttcagtactgtcttgttttgtaagttcagcagtcactttcttgtgggtcctgtatgtccagtttatacagcaacaaacagtccaggcaagagcagtttctttcccaaatgactaatcttgccatgttgaaaccaaactccataacaagtttcttcgatgcccaatttctgacgtaattggtgtgccaggagcagttgtgtctcactgccaagaaaaaacctaaaccatttaaatgccatatttctgtaggtctttgaaaggtttgaagaatacctaaccatctcaaatacatctctgtatatctagaaaacctaactaacctaattataagttctgactattataggtaaaagatctgtataaacacaatacctaaacaataggagacatatacatatcacaaaattgaccttaaagttgtatcaataaatgaaaatccataccaatggattccataccaaagtattcattcctatatcctattcccctttttttctttaaaaaaattgactatgctcattatcatttataaccaaccccatttaaatgaaaacaaacattaaaaacaatatttgggaatatgggcgtcgttctttctaaactgcttcttgctgattgggggcaatgtttatataccattggaatcatgataaaacacagaaatctgaccaagtccttgtttttgtagtctgtaaggctgtatcatctcagcttcaggggggtcttgcttgatcataccatgttagtctggaaggaatccatagctttttattttctgtggaaacataagtaaaaacttttttccaagtagtccttagacttaaattctgaagtcaaagcatttttaaaatgtataagttggattaatttagcagcatttataatcaaatgtattttagcagcagtaagtctttcctcggcaatcaaacaatttaaagacatatagcatatagtatccagattctctgtgtattttccatctttatgtggcttttttattattttatttttacttccttttgtttcttttttcccgagacagggtttctctgtggaaatccacctgcctctgcttccttcagcaaatgctaccggcgtgcgccaccacaaccggctactctatttcctcctgttactttctctctcacaagcctacatatatttttaaacgcagtgtaaacctttagaggtttttctttatctggatctgtctttatcatcttgggagtaccgagtctaaaccccagaagcgacgggatggcgtgagcatatggaagctgctccgatgcctctcagtggcccggcagggcaggctgtggtggcaggtttccctctttctctgggaaccttggggcatggggttatcctgtgcactgacaccactagttatttgtttttttgtgcctgtgttagtccactaaacaaaatatcatctgtattgtagcatgtgaaagaattctttaattagggctgaatatatactgacttgctaatttcaatgactacatgcccatcaatggatataagttttgtaaattattgctctttgttttatttttacttttttctttttttttttgagacagggtttctctgtgtaacagccctagctgccctggaactatctttgtagactaggctggccttgaactcacttgcctcctcctggcatgagttaccaccacctggctgttttttgagaccaggtttctttgtatagtcatgactatcctggaacttgttctgtaacctaggctggccttaaactcatagagatccatctgcctctgccttctgagtgctgggattaaaggcgtgcaccaccatgcctggctttatttaaatttttattatgtttattttttgtctgtctgtgtgtgtgtgtgtgtgtgtgtgtgtgtgtgtgtaggtcagaggacaacttgcaggagtgtctcctactatgtagattctaggaattgatcccaagtcattaaagcaagtatcttaacccactgagccatcttgctatgttatggagttcaagacctcaggaaaagaccacagactcaatctggactataatttgttaaattcattagcaggacaacaatgtttgaaccaaacttgagggggctgcatgaaggggggctttttaaagatgaaaaccctaagaagaccttgagtgtctgcataagcaagccaagagctgttctgctctgccaaggttaggtaatcaaggcaacctcaaaatagcccttgaatgtctgcataagtaggtcatggaagccaaaaaagcagttagtcatatcataacaaaacagatggtcatggctacacatttttgagtggaggtcactgaatcaggtttactgggaacttattttctaggaactagagtcagagactaatggctagtggggaccaagaaggatgcctagcacaaaatgtagtttctttagccaccacggctggccctatttatgtttttaattttccttttttcctccctcctttcctcctttccccctctctctttctttcttccttttttatagggacttgctatgcacctgaggttgactttgaactcatgaacttcttgcctcagctttctaagtggtgggatagatgtgtaacaccatacccaacatatttaaataattttaacgtatgtactttatatttaggtgaatgctatccccttattataagtgctcagggactttagctttcctttcgttggtacgcttttacttatcagcactttatccgtgtactttgttttgttttcttttgagactctctggtggtctcggtctggggactctcttttctaagcatgtggagcatatgtgagtgagtgagaaaggaataccacaaaccaaggtcaactttgatgttggtgtcttgagttgaggaggtctccagggttgagtgttatgaacctgagccctagacctaatagaagacagacgtctggtgtttggattctcaggttctcacgcaaggctttgtttccaccactcagagcgaagacagacagacaaaccaaccttagagtcatcccctaattcagacggatggcttttccctttaatctacccgatcatgcatggggcaatgctaactttattggactttttgtgtttcatctctcgactttgaaaggtttcaaaacttcactccctttttgtaaatgtacattaagttccaagacctgggtgtgggctcctgacccagactggccaagcagtcattattgaggttagaggtttacactgtgagagaaaggtcccaggtctgcccaagggttgtgagctctaaggaacacgagagaatagaactgcttgagccttgacataattggacagctttggagaatgaagtcaagcggagacaagcagagctaagagatgaagtgagacaaggttctattatgttatttgaactgtggatcctgctgggctggaagccacgactatcttagatttttccagctatataagccaatcgatcccctcccctttttctcattacactgatgtattagctcccttcttgttgtgatgaccaaatgtcagaagcaatataaagttttattttggctcctggttcaaagaaattgagtctattaatgcaggagaggcacatgaggcaactggtcacactggctcagcggtcaggaagctgggacagaaagtgaacaagaagtggcatgggactatgtaaccttaaggccttctccaccacctgcagctccatcttttaaagtttcacaagctttcaaaacaggtaactggagatcatgtattcaaagacatgagcctatcagggatatttttacacccaaaccataaagtttcttaatacaattctggttgttttctaacactattatgactaacctatctagtttcaaattctctttccataattaatgtgttggttgcatcaccaggaaataataataaaaaacctgtcttatagagatgtttatttaactcaaataatcataagacttgaagtagggtggtgtggtagtttgaatgccattggcccccatcagccaattgcactgttgggggtggcactattaggaggtgtggtagactatggggacctttgaggttgaattgaatgcagttctgcgttaccatagtgttacaagtgtatgagggccagggagtggaatgcggtggtcaggagggggaggatagttttttagttgttctagtttttgagcaggatgagtcaaataacccagacttgaatccaccatgttttgtgtctttctcttctcagttgggttccagagactatgtagggcttttcggggttagaagtgaagccccacgagaagaaatcagacagggaagatgcggggaacagatgaagctctgagtgaatggatattgttgacgtaggcactgccatgtcaaggaccccaatgcctcagaccatggaaataacaaagccttcccctggtctgagtatgcacgttgagagagtctacaggaagtatccaatcacagcttcctcctcccagataactgcagcccgggatagctcactcctctatggagatgggctaaccctccttatggctgtatgtaataaacttacctccttgtcagccatacattataaatatgctgagtttccaggttgcggttggtgtgtcttcatcagagagggaatgggcccactcagtcccagcttttctgtatgtgtgtgtctgctctttctttattctttcctcaccccagtcaggttgaattgaaacctatacagaccatacctatggtccgtcttattggccagaagcattcaagtgccttcttccagcagaagagctggggagggaatgttttgaattttgttgtctccttattagaggtaggcaaagagtaaaaaaaaaggtagagatggaaaaccccatgctagcaacttggattatatcacttcccttcacttacaagccatcagttacctgtgacttgtacagatctttccatattttaatgctgagtgttggataaaggccaccaactcagagacaatggagcttctacaaattagtagaatttaatattatttaggcagatagaactgttgttcgttttattgtctcctcctcttactgtaaatcttttaaaatgatttaaatcttagtgtgtgtgtgtgtgtgtgtgtgtgtgtgtgtgtgtgtgtgtgtgtgtgtgtgtgcatgtgtatgtgtgatgttcatatcccaaaaatgtgtgtggaggtcagaggacaactttcaggactcagttctttccttctgctatgtaggttgtggggatggaactcaggttattgggcttggaagcaagtgtcttatctgatgagccatctggacaatcctattgtgaatatttaagctcaattgtcttctgtaaatctgctccttatagccccctcgctctcaatagaatagagactgctgaggaaattgagaccgaaatatatgaactccctcaaaattatatcttactctctttgtttcccttgagtttaaagagtggaacccacaactgtagtctttacctcattcacctccattatgctaaaagctactttatgttggttttatcctttgtgtcctaatatttggcttcatgcggtggcaggcataccataagtattagctgggcatttattgaagccccttcgcagggcttagccacatcaattattccttcttctgaatgccttttttcttgcacctccaacttttagtttattcttactcaaacacatatttttaaaatgtttgtttatttatttgtatgtatatatgtatgtattcatgtccatgtatgcaggccacggcatgcatgtggaagtcagtcggaggacaacttgcagaagttggttctctctttctactatgagatgtcctggatatcaaacgcaggtgctcaggtttggtgacagagacctttatctgctgtgctcgataccttgctcaccttcaaatttgcatctttaaaacagatttattggtttattttgtgtatgtatgtgtgggagagagaggaggggggtgggagagagacagagagagagagagagactgtatagcatgggtgcatgcagagaccagaagacggtatttgatccccagaagctggagttgcagacagttttgagctgtctaatgtactagaattgtacttgggctcacaaaactatctctcaagaccctcaaatttgcatttttaacctgaaaccacaaaagacagaaatccccccatgcaaacccctcttcacgttatttgcattctcctccttgccagcgtctgcccttccctggagacaggcatctgctgagctcagcttctgagaaaacaatctccagttttagtttctgcttccatttctccctgacatttctcaagtccttgctttctaacttcaatgtgagcggacgctccctgccgacttcctcctcaccaaactcatgtattacttaatttctgaagaattcactgacacatttcctatttcttggaactctccccttccttgagttttgggaagctaggttctcctagttcccctaacttctaccaattctcctttcccatctgttggaatccctgtcgctaaagatctctgtgatcatctttccctaccacacactagcacagtctcagtagtaccatggctccagctttcactcaaatgaaaacggtttccaaacgtgtgactctccaaccagatccctaaaagaggtgagggaaaaaaaaaaaccccacaaatcatatgtatatctggaagactttctaaggagtaggaatggagactttggaggtgtgagtgtacttaccacatataaagagtggcaaggaagatggtgaggacagagctgaaactttgggaggaaattagtaacaaatgaggacagagatgaaatcatgagggggtcaagtcatgtagaccttatggaccattttaatggctctttacttttgtgagaagaaaaaaacttggagggatggagtagagaaggttatgttctgttgaaggtaacttgtaaaaaataagacaggaattagagcagcccagtagaaaactagctggttgacagtgttctggaccatgggagcatcaggtaaacagctgattccagttctgctttgaagggagaactaatagcatgtgtccgtagattggacgggagagtgcgagggaaaggaggactccaagggtctttgtctaagcaactggaaagatggagttgcagcttatcaagctgaggaacactgtggcaaaaacaaactgtgaagagattgggaaggtctacttggactgattaatttattaaagagattgaagtgtagaagccttaaggcagttggataaagaatggagtgtaggagggaaatgataacacaaggggcgtgaggagaggagatattttttttttaaaaaaagcaagagtcaagtgaatatctgaacggctaaaggaatggagggcagggttattggggaggaggccaatgaccaattacattgagttaatcgcatcaattgatagggagtagtgtctacaacaggaagagcagggcgggtccagctaaaaccactcaccttacagccatgcatggtttcctccttactaaaattttatctgacattttcttcagaattagtcatcacttcccctttcctctaattcttttttcattctcttttctttcattctttgctgtcagccttcctcctttttaatttcttattgaaaaaaattaaagataaggctttgctgcgtagcccaggctggccttgaacttacagtcctcctacatcactgagtgctgggattgtagattgtatctgcatgtgactaaacctgaatagctcttttgccttcaattattcatattttcttgaaatgtgacagccctgggaactgtttattctcctaccttttgggtcaattccatttttttttttcatcttgtaaacttatctgctcagtggggttacccagtgttctctatatattctctcttctcactgtatgcacactttctgggtgatgttacaaatctatgacttcagctgttgccccaatgcatatggcccccaaatctttatctctagccttactgagctcctctgttcctgtactgtacttctgagtgcttgatgagtggccttcggatgtcctcctggcagcttaaattgggcctgagttaccttctctagtttctctctgtttgttttaaaatttcagtcaaccatcaagatgtctgacttttcagtcattcctcttcctcatcttgaatacatactcagccactaagtcctttggatttagtttttccttcttgtgtgtgtgtgtgtgtgtgtgagcgtgcgtgcgtgcgtgtgtgtgtgtgtgtgtgtgtgtgtgtgtgtgtgtgtgtgtgtgtgtgtgtgtgtgtgtatgagtttgggcacatacttgacatgttgaatatatggaggctagaagacaatctaggtgttgatccttgccttccaccttgtttcagacagggtagagagatggcccagtgattaagagtgcttgctgctcttccagaagatctgagtttggtccctgtactggctggtttttgtgtgtcgacttgacataggttagagtcatcagaggaagatgccttggttaaggaaatgcctccatgagatacagctgtaaggcattttctcaattagtgatcagtgggggagtgtccagcccatggtgggtggtgccatccctgggcaggtggtcttggattctataagaaagcaggctgagcaagccagtaagcagctcccctccatggcctctgcatgagctcctgtctcaggttcctgccttgtttgagttcctgtcctgacttcttcactgatgagcagcaatgctgaagtgtgaaagccaaataaatcatccccccaccccaacttgctctttggctgtggtgcttcactgaagcaatagaaacactaagacagttcccacatcagacaactcacaagcgcctataactccacttcaaggaaactttacgccctctctggcctccataggtactctcataatgtgtgcgcgcacacacacacacacacacaatttagatggggtcttatttactgttatataccccaggctagctggcccatagacttctggggactcttttccctttccactttttcctctttctgtaggatactggtgtgacagatgtgaattcctgctcctggctttgtcttggggatttaaactcaagtctcaagtcttccctttcccactaagcaatttccccagccttgtggattccatttgagaaatatgaattctatttcttaaatgcaacactcattgaatctaatctcttccctccattaaatctgtatcagtgaaaaaaagtaatgtcaaagagacactgatttcattaatttaagccagagctgaagagatagcattgtttaatacccccaagtggctatagtgatcttcctggggaaaaaaagaacattcacttttgcatacagagtagatgacagtaatttaagagtaaattgatcttctcagtgaggtggtgtttgccctccactgccttaaaagaagatgggtagtgtatttatggatttgggagcctgaactactgtagacatattcaccctcttcccctcactcacatttatacagcatcacccatctgcctactgccctcagagtcaggggataaggacagcagagaaaacaataatggataaggaggaaagggaggggagagagcagaatgtgagcccataggttgggaaccacttgtctaaggcaatgggaaggaagccgcaagagaattgttatgcttcaggcataggaagtaaccagtttagaatggagtaaaaggccatatgctccaggagggtgctttaaaacagtataaacttatagcttagttaacagacttaactaggttgagagtacattgagagtcattttatatagttgaggaggatttaagaagatgaaagtctaatgaaaaccaagcaacaaaaaataaggcaactattaactcttaagaaaaacaaaacaaaacaaaaaattatgtgacaaaggaaatgtaatcaaatcacttatcacatcagtaactagccattttttaaaaacatatggccatacagtatagatttagagaggaatcaggcactagggaaactccagagatctacaaggatgacaccaactaaccatctaagcaacagaggagaggctaccttaaatgccctcccctggtaatgagattgatgactgacttgtatgccatcctatagccctcatccagcaactggtggaagtagaagcagatacccacagctaaacactgaactgaactggaatccatttgcagagaaggaggagtgatgagcaaaggggtccacaccaggctggtgaaacccacagaaacagctgacctgaacaagtgggagctcttggtccctagactgatcgctgggaaaccagcatggaactgatccagaccctatgaatgtgggtgtcagtgaagaggcctcggaaatctatgggacctcttgtagaagatcagtacttatccctagcatacaaatggactttgggagcccatttcacatagagggatactacctcagcctagacacatgggggagggcctaggccctatcccaaagcctatgacagattctgaagactccctatggaagtcctcatcctccctggggagcagaaagggtatgggataggtagggtgttagtggggggcaggggaggaggggagggagagggaactggaattgacatgtaaaacaatcttgtttctaattttaaataaaaaaaatggaggggaaaaaaagtccaagataagccatatgcctttaatcttaataggcttgggcacagggcaccagttgaatttccagcattatatacttctgtgaaaaattgtctctcttttcaaatgtataatgttcaattgtgtggtatagcaatataagttatcttgttcatttaagggaacttaagataaaatactccttgtggaaaagccaggaggatataaaattgaatgtgaaggtctaagttttatgtgaatgaaaccgagtgttgtctattagaatgccttgagaacacaggcaataaagtgtttctgtcataagaaaaaaatatggccataatgataaagtcattgaatctgtttgtatttattcaaagttgacatttatttaaattagaaagatgaggcagggaagtatcttagcaattaataggaaatcaagagatactgtggtgtgtgtgtgtgtgtgtgtgtgtgtgtgtgtgtgtgtgtgtgtgtgtgtgtgtgtatgggaaatatgagtgtagagaacataaaataaaatcctttacctagttttaaaatgcatttcaaatcattgcttgactttcaactattagtttataaaattgaaaaaaaagagtaagagcaaagatgactgttagtaggattatatattctgatctaagaaagttatttaagggatattgctaagtaaaaatataacaagtcaaaacaaatgaaaaacaaaaaccaaaaacaaagaaccaagacaaaattatgaaaatatttcattttggtaaaaatggtactattttaaaataggattattaatggtagctatcttggacattgtagagaagttttgttttggagtatgccaattattcacaataagcacatgtattattttttgagaaaaaaatgaaatatactaaaataattattaaaagcctatttctcgaactaaaaatcctactcaaggacagaggagcattgtttttcacatgggtaaaaagaatagaaagggaaacgagtaaaggcaagaaatcgcatgaatgtagtcaagtagtatactttctctttttttatttatcttattttactttttgtgacagagtcttgctatggagcttagatggtcatggaacttcctatgtagcctaggctggccttgaactctaagttcaaggccttaggtgctgaagctattcaagaagattctatgacttcaggagaataaaacttaatagtgatgataacatctgtgataagatcattttttttgagacaaggtttcatgtagcccaggctggtcttgaactttctgtatagctgaggacaacattaatcttcttgagtctacttcccaagcattgggattctaggagtgcctaccagatggcaccaggcaaaactagaagttagacctgacatttcttgaactttttaatgtgttaggcactatgctaagggctttagctttacagtcatcccttggtattcctgggagatggctctaggctatccctagatgccaattcctcatataaaatggaatagtatagaacctatatctaactcaagggagtaataagaaaaagtatgtatatacctagtatagatataattctttctcaaatatttcagtttgtagttgatagaatacagagaagttgacccacagtttcagagccaactgtattatcttatttaatttccacacaaacccattacatatgcattcatttattaaaatattgctgtaacacttataatgtgctaggtattaattaacacagtgtaattaattaacacaatgtactatcaataaaataattattgtctctgatcccactaatttatgttctaatgagggaaacagatattaaaaataaaaataaatattcaatgacatgataaacagtatgaaaggtttaagagaatgataaagaaacctacttcaggtagagtgctctgggaagatctcttcagaagctaaagtgttttttttttttgttttgttttgtttttttgagaaagggtttctctgtggctttggaggctgtcctggaactcgctctgtagaccaggctggtctggaactcacagagatccgacttcctcttcctcctgagtgctgggattaaaggtgtgcgccaccacctatctttagatatctacttaaacactttagcttctgaagataggaggaacctacagggacaggaagggccttgaggcagatgtaaataactgtaatatggagattgttcttctctcatagaggaactgagggatcacagaggccaaatagagaatggagagagtgatgctagcagagtctggggaactgtctgtcagaccatcctgggccatggagactggctttcacacggaatgcaatgaggagtctgtacggttatgagcaggtgagagaaagggctgatctatactagggatattttgctggtggtcttttgggtggtgggcttcagggagacaagagaaaaactagaagagatgtttagaggttgttggagtattcaggttccagatggggagggttgcacctagagccatggtctacaagttggaaagagatagataatgtttaatatattttggaagtagaggctgaagggcttggtgatagagaggctgcaatcagggatgacatcaattccttgctatcctgttattatttttggctatgagattcaagtgccaataacaataggaaacatcccaggagacctgtctagtcaatgatttgtagagtgtgggcccatccaacaccagacaccacatacttaacccaaaagtcacattctctctccaaccaattacatctcacttgccttctagaaggagagacatcgttacctgcagaattataatctgttggtcaaaactctgtttagttaccaaagagaaaacaacatgtaggtgtgttatccaaagcaggatttgtcctggagtggactggaaagcagttttggggttccacattggagaccttgctactcgtcaagcatctgacccatgcatgcaggatcaagtttgacatgataaccctggatatccagatttcattgccagtagaaaaccaggcttctctgttcacttccgaggggtcagtagatgtgttctttctgaattcctttaaagtcctccaccaacttacttgatgtccttaagagtattgatcctgggagcaatgggcttgttttatgaggagagaaagaagtaggttagtagataggccgtagcctaccctccatggctacagagaggacatgaaagccctgctggccagagagtagcgctattgacagcctcaagtaggattacattaaaaaacaagtaggttaactataataggtgatcttaaaacaagataatttaaaatttcatcactttatttatttattgtgtttgtgtatgtttgtgtatgtatgattgtatgtgtatgtatgtatgtatgtatgtacatacaaacagagaacaacttgtgggagtgctctcctacagtgtgggtcctggggattgaactcaagtcattaggcttggtgaaaattgccctttacccactgagttatctcaccagcctcaagataactttttatattttgtcccaagactttctttttttttctagtggtatttaaatatctgtaaaatggaccttttgttttatttgcaaaattgtaggtttgggagaggagtagaaaaaaaaaatacaaggacataggggctggcaagaacatggttgctgagcaagatgagaatttgagttcaaatctccattccccatgtaaaaagctgtgcatatgcttgtaatgccagcactttaagggacacagaggcagggagattgtttgggctttctggccacaggtttagctttgggttcagtgagaggcaccgtttaatggagtaagatagagaatggtaggggaggggactgatggggcggttcccatcttcacacacataagcacaaaccacaggcatacattagacacatattcattcactcatacaaaataaaagaagatagaacagtcatgcatttacctctctggaatgattaactatggagtaaattgtcatagaatcattttttatagattttgggatttccatttcctgtaaagaacaacaaaaaaagaattttatgcatttggctctcacagagacaaaagaggtacgtgcatgcatatatttttgtgggggagacagtgtgatgagaaagaagtggcatgccaagagtaggtggggacttagttctaccagtttaaatctgtgaggttctagcaacatttcttgagaagtagaaaggcagcctaaatagaagagcaacatcccgtcaatcccaaggtcccaactagagagcaacagaaaggtggccatgtgtgaggggctgaaaacatccttgtcttgcatctgattctatgcttgcttctcctctgtctgtgagaattacatgccagatagttattgcatcgtatcttttctcccagtctttgttagctataactggagccatcttcattgcctgctccatttatccctgttattctaatggcccagtcactgctttgtggtcatggttgggaactagaagtatagaaactcctggttttaatatttagagaataattaaggccctagaaactctccaaggtataatgctttttttttttttttttttttaaagaagctgacaaatgggctagccattagtgttttgggtttgttggagagcttgctcccagcgggagttgggaatggcaattgagtaagtggtgtgaataccctttattgtcttctcttttaggaacttcacaaagtctgtgatgagcttggccaggagtgtttgcttggggaatccaagacttttagctgggccatttgaagaatgccatgttcttttggctgatttttcagaaaacacgagaaccagctctccagtctgtttagttattcagaaaagtgtccccagtattgtctcaatcataggtggtgggaaagaggattgcctggagcttgaccaaggccatcgtattatgtgggagccccttgctttagtttccttcattgtggaggggttatgatacttgccccccttgtcttttgagagaccactttagggtctcctagcacccctctacctggatgacagctcctcctaggtataatctcctctgatctattcctgtgttcattgagtgtcatgctacatgaagtaagggaaagggaggatatctaatttgtactttcaagcaggttgtccctacccagaaaggataagatctactggaacattaaacagttaaagaacactaggaatcaagtaagagtgaacattcccttaggggtgatcatagccgacactgggatgctcagctctatggctgccttctccaataatggatgattatggtgacaagtttgtgagtaatcgtaaaataacagtggtgggggacagagtggaaaggacttacctgcactggatgagtgacctgtgcatacacagtgttgctccctggagagcctggagtatctgtgttctgggaggaatctatggttaacacaaaaaaggtatggctatcagtggtgggactacagggctgcttccctcttgcgtcttgctgatctctagagttttgttttgttttgtttttatctccaaagcagttgtttcaagcttgttcataagaacggtgttcttatgacttacagtctcagtgactccctcatgctcaacacatgatggactaaagatcaccaccacccaagggatctctggagacaccgttttcacaggcagtgtgacagatttgactgttttagagatgaagaattacaggttcaagagagctcagtagacctatacaaagccactcaggaagcagtgggacaggaattggaaagcaagtgttctgacccctgactttgtgccctctcttcaacaatggtatcttgaaactatcacccaccgggtgagacttagaaaatgagtgtgcattagcctctctttatcacaccttctttttcaatggtgtctatctattggggtttaaaccttggctgaacatccatggtacagtcacggagcctggttttgagtgcttcatgctcaagtcctatctctgttcgaaaccagctgggtgacagtggatggttcatggatcctttcactgggacttattttctccctcagaaaggaagtaagtgatcttgaccttgctatagaaaaccgtggtgccccttacatgcttgggaggaactctacaggtctcatggtgacaaaccaggctctctgacaccatagggtccagctgaacagccatgttctgctttctctccttctcactgttcagccctctggccagcccccctctctctctcctctttggtttatcccttcctgtctgctgtaatcaagagcatggatgctcacctggatgttggctagccaaaaaaagagaacctgaaagagaaaagcaagaagctgaaatgcatgacttcagtgagggaagtctttctccctcctcccccaacaggtggctttccagaggatacaggtaacaggtcccaaatgaagggcagctgagcaagtgtaccctgaagctgtgtcctgcttttctcaatagacaccactcttgaaatattaacagaagcctgccccaccccagggggtcatcccaatgcattcatttagccagagattgtgtccaccctcccttggcccttggcagccagaggccccagaccctaaacacttgcggttctagagatagaagaaggcagaaggaaaatttacctgttcttttcttccaaagacatatgactaggcacacaacgactatagccagcaaggtaccaataattataaatgtttgatgccactgtagatttttctcaggtaaaacacctgaaaagaagaaggaaaaaaagagaagaggaacttctcaggatacataaattgagggttcctgggctggagaggtggctcagaggttaagagcactgccctttcttccagaggtcctgagttcaattcccagcaaccacatcggttatgagatctggtgccctcttctggtgtgcagatatacatggaaacagaatgttgtatacataataaataaaatctttaaaaacattgagggctcctttgaacttgttttaggcctctcttgagtctcttctgggctgccttcaggggctgggtaaggccatttatactcccagtttggggccctgtcaggctttctggggtcccttgtggaggcaggacaggtagggtctgcttgggggagggagaaagccattctggctcctgaggctttgctctaggaagaggacttgaggagggaaagagggagactaatgagaggcatagttttagagcctgcctgtccttctctctgcaggagtttggctcctcccattgccactgtgcaggccctcacacaggctgtgactccatgctataacactacacagctgcttgaagcttccaggaagacccaaggcaggagttacctttacaaagactctgggcagagacagagacagacagattgctgacagcattctcagcttggcaggtgtaactctggtcattggaattcttcgggtcccaggagacagtgagatttggttcccctaaagagatgcttcctgaggtcctccacccaactgagactgtttgatttggattctccgcaatacaggtcaggtggatctcgcaggtcccattctcaaataggcgagtatgattggtaatttccaagttgctcagtcgttctgtgtaaaaagactgtagttaagaacacatggctggggctggagaggtggctcagtggttaagagcactgactgcccttccagaggtcctgattcaattcctagcactcacatggcagctcacaactgattgtaactctaggatccaacactctcacatagacacgcatgcaggcaaaacaccaatgcacattaaaaacaaacaaacaaacaaacaaaccaggacacatgattgttgtgaaatagcttaactaggcaaagatgtgctccatttgtttctgctgtggactatgactttaactatgggaaggcgtgctccatttgtttctgctgcctttgctgacggcgtaaagatgtattatatttgtttgtgctacatttgtttaatgatgtaaagatgtgttgcatttgtttcaccttgcctgactaaggcacccaattggtctaataaaaaaactgaacagccaataggtaggcaggagagggataggtggggctggcaggctgagagactaaggaggaggaaaaaaaatctaggcttgacagaggagagagaagagaaaagagaatgagggagattcgcagagtcagttagtctggcaactgccagtaggctagatacaagaagtatatatagatgcaagatgtacagaaggaaagaaaggttaaaagccctgaggcaaaatgtaagttaccagagcgggacaagtataggataaggctgagcattcataattactaatcagtctccaagtcatgatttgggagctggttggtggccccccccaaagtctgctacacatggctttgctcatcatcctaccttcctgccttttctttcggtgtgtgcatatgctagcgtatgcatgtgtgtgtgtgtgttcatgctcacatgcatgtggaggttagaggctgatgcagcatgtctccctctgtcattctctgccttatattttgggacagggtctctcattcaacccggagcttaccagttggtcaagcatagctgctcaacaagctccaggggttttcctgtagcttcctccctagagctgggattacagatgtttgtcaccatttccagatgtctatatggatcctgaggactgatgtcaagtcttcttgagggatgctctttgagcacacacgaactttgttatctgttctgggtggctcttcctccagatatctgcgtatctattctcttaacactaatagatgtcgactcaaacgtcaggtcatgttttcaatgaggcctattctgatcgcttcctctaaaatgattccttgggcctggtgtacattaagtgatagacagagcactttcctagcttgctcaagagcctatttttggtccccagcaccatgttttctgccccattccctggcactgctgatgctccaatccttttttccttagcactcacggcatactgtaagtttcatgagggcaacagcctttgttttgctcactgatgttttctagttgcatagcagactgccttgtacattatccatggcaataaatcttgttattcaatgaataggtataacatgtcttcatatccaatactaaactctagtgggttactcccgattaattggaaattatcaaattttgattatctctgtcttttcttttaattttttactttttggtttttcgagacagagtttctctgtattgctttggaagttgtcctggaactctctgtagaccatgcttgccttgaactcacatagacctgcctgcctctgcctcccaagtgctgggattaaaggagtgcgcctccaatgcctggattattatctctttcttaacacagagtgtatggtcagtgtctgaggaacaaaaactgtatttcatccttggaaattcctttctactggtgaggaaaaggttggggcacagctcacatatctttgtgtgtatgagtctgtgaagggaaggtgctccaagcagccctgaatatgggttatcaataagtgtaaggagcctggttgctgtagaagccatggtgtcctgaacagtgtcagaagaacggtgtcccaggacatgtgatagagcctggcaggcagcatctattctcaggggttctgttgcatgcatctcagttctcttcagaaatctggtagtgctttgaagatcacaaaccagccaggtgatcctgactggaatgtctggaatgaggacagccctaaagagacacccacatcttaattccagactcatgctatcttacttgaataaggggtctgtgcaaattttctataaactagttgagaaggtcacccctgactttccaatgacaagtgtctagctaagaggtgagccaagggacattggagacagacagaagacaggacataaagaggtggccaaagaacaccaaggaatctataataatcagaagcagcgacacaaagagcagaatggccttctgttcatacctagaacttcacaagagtagatttatgttatttaggtcatgaaacttgtgaaattttgttttggctacttcaggaagcaaatacatttttctgaggctacctggcccccttttttgtggaatcctctgctcagaaaatttccagacaccctttttatagcagtcctatttacttgttctgtgttatgttctttcagtgatatgactttgactagcatgacaaggcaaagtcatcaaatatgcggggaatataaaggtaacagggtaaccaatttgtggagacattttattttaatggtgccttttaaaagaattccacatcttaagccataggagtataaatgaattttagaccttgaggactcttcagtgaatagaaattacagagtctgagtggtctttaaagttgtctagtatggaacccaattcacatatttatttttaaaaatgtaataacatttaattttaatttattttttggttttttgttttgttttgttttgagacaggctctctgtacgtaggcccctggctgtcctggaattcactagtctggccttgaactcacagagatccacctgcctctgccccaggagagtgctgggattaaaggtgtataccatcatgaccagctaataatttagttaaattaactatttacttttgtttctctgtctgtctctctgtctctttctctctctgtgtgtctgtgtgtgtctgtgtacatgagtgcatagagaggtcggatgacagcttgtaggagttcattctctccttccacctgggccctggaaatcagactcaggtcgtcaggcttggtagcaatcacctttacctactgagccatctcactgcctgtggtagttcagtattttgcttccattaactcttcatttctggttgaaaggggaagtgaggtgactggtgaagagagccacaagatgtaagtttctaactcagcccagctgctatttagctgtgcagtgtcatcaaactgttctacttctggacctcatggtgatgccaaacgccatccttggtatcactaggctacactgcactgttgttggtacgtagcgttgacatacgtgatttggatttgttttcagtttgtatgtgattaaatgatgtatttggactcaccaaagaccctcagtttataaatagagaagtccggtgtagggtcttttgtggttatctgtgctctgtacagtcctgcatctgccattgtgaggttgttgacttgcagggagtaggactggatgatgctcagtcgctctcccctctttggatcagattcgatgattcgtggagttttagacttattgagctggacgataaggatcgtagtgtcttgtgatgcttctcctttgtgatgccagatgatgagactggcctcctttcctgcaggaagctccagaagaagagttgctgactctcctagaacaccattcaccacccttgggctttgactgctttgtggaacttcattccctgtaaacgcagaaggagaaggctataaagttgtcccgctaaccttccattcctgtatcctttctcttaattctgccattctgtttaagctctttggaagaaagccagaggtgtggtggagggaataaaaaagggctagaagtgttgtggtgggcatttacacacccagtagctccacctccagcaaagtctggcagtcttggtcaataggcaattggtctagttaggtgatcccgacccatggtctgcttccactctggcttgtcatacttttgtgacctcagtctttgaaattttttggcaccaatctgtgagagggataaggaactttattaaccccttgacataagctccaacaatcgcaagtctttgctgatggcagtattgtcaagccagtcatttataatttacctagtgtctgtctatgtagcatgcttttgcaacccagagagccgatagtagggatttactgcatatgcagttcattgcctgcattatttcatttgatgttggtaactgtctttgaggcagataaaaaaatctgtttatggataaggagactgagacatagagaggttaaactaactttccttggttgtacatctgaaaaatagcagagccaggaaaaggagttggacttcctggaactggagtttcagacagttttgagctgtcatgttggtgctgagaatcaaaccagagttctctgagagagcagtccatgctcttaactgctgggttatcacttacaactcttaaagaggatgtttctttagaatcaatgccaaattctttaaaaatttttttgttgaaataacattttttcatttattttacataccaaccagtttccctttcttcctctcctcctgtcccctcccctttcccaactccccctctcccccatccactcctcctccatctccattcagaaagggacaggcctctcatgggcttgcacaaagcatggcacatcaagtgaggcaggatcgagctcctctcctaaagtccgtcagccaggtaattcaacatgggaacagattaccaaaagcaagtaagtgcccgggagaggtcctgctctcactgttagaagcctcactaagagacaagctacacgattgtcacacacatgcatgcataccaatcccaaggacacttgctcaactatgttcatagtaatgccaaattcttagcccgcattactctgttttctagagctctgcttgctggtctcacagtgattactctcatattccagcaccgtatttgacacatgataggatctgtggaaatgtttgctatcagtcaacaaataaacctgattgtgacatcagctttcctgggggcgaggggaaggggtgtgtgcctctaattttctagggaagagttgcatgtgtgtgtgtatttatggggtggcccagaggatcctgacacttactcagcccttacaccagctcacgcttctgcttttttttttttttttttcctgaattgccatacggtttccaggcacatctgtattgctgccacacatcccctcctgcgctgtgtttcccatcagcctttcgacacatggccatttgtcatcttgacctctctgtcctctcagaatcacatgagtaaagtataacaagcaaagtcttgagaccaaaatgctccctcaagtagtattttgcttatttcaaattaaaaccaagtaagacaggtctgtactgtcagaaatcctaagacttagcagggactcttcctccaactgcctagcatattctttaagttctcttgattttattgatcaaaattattcgatttttttgtggttgtggttttgaggcaaggtcttatatgtagcccaggctagcctcaaactggcaatcctctgccttagactcccaaggcctaggattacaggcatgtgtcaccatgcctggattattagtttagtcaaagagcatttagtcaaatgcattctatgatttacttagttctgtgctaatttaatgggtggaaatttagaaatcatggcatccagactatattattgatttcccttcatatgtctgcttctggtctggatctgggaaatatatatgttatatgtatgaacaagatagtcctgattcgctggtttgctatctgacagagaagactgacaggtgaatgagtagctatggtgtggtgggtaggcgttgacttggcattaggtttgcctctgtattgtcttagtaccactcttataccacctacgttgtttcctgtgtactcttactgctttagcacagtttcaagtcaacaaataatgaattgatggaggtatgtctgtgctctgtggaagcacaaatagtgaatgatggaccagggacagttatgaaggaagaagctgaaaaacaagatgttgtaggaagattttgaataacaacagggactttcccattgctcagcgatttgtaaatttccttgatgattctgctgtctttgtactatgtcacttctgtttgaaatactttccccttcatttctacatggtaagttgttactttgctttgaaagattgctgaaatacctgtttgcctctgctttgatttgtgggcattttcactggtacagggggaggagaagggagttgtgttgaagacagagaggtgtatggacagaaggaacagtagcagttccctgcaggtctaaaaccagatttgagtcaacaagcttataatacatgaagatcagaagtcactgagcatatccaaaagaccaccaggtgatggtagattggcccagaggaaacacagaatttttttttttcctggattgggcgcagatgtttttaatcactctgtgccaacacctttggtatgaatactaatgttctgggacatccacgtactctgctggcagtaagtatggaagagtagagtcagaatagaagagtagaacttggaaagacacttcatggtggctctgactgtggcaggctacttggcatgttggcgggagaggatgcatagaaagcatccctttggcactctacgaaccactggaggaccacttggactagggagagggtgctgatattctctggtgatatcaaaccagggaacattatcccatactttttatgtttcacccaatggatgacatgttctgggaacatgaataatgtctggcttagcttcttatttctccagaagttgcttcagagtattcaatgaaagctattcagactgaaattagaatgcagaaagtcttagtgggtcacttgaacagtgagaattgactttgtaaagtattagtaaatgtgctttggacaagtagaaaagtatacggaaaacaatgtttcaggaaggataaggcatgggcaggccgaagatagctctgaaaaggaaccaaaagtcacaagaaaccctggtgtttctaacttagaagtcttaggtctgttcatagccaaaagaatacagtgggatgttttatttcccaggcaatgaattcagagtgaaagaaagtagagactgatttaccgagcgagtgtaccaaaggaggaagagaaacagagcagaccttttaggtggatatgggatgaaggaaaggtggtcattaggataacaagaacccttggtaaacttagagaaaagggaacagtgcatggagaagggtgttaaaggtatgatggaaaggaatggataaaacacagggctgtttctgaggaggaagcccaagtggggacaggaacacaagcgtggtgtcagttttgaatggagggggtctcttctgccatcaaggtaagcaagaatgaggcttaagagatttataggtaaaggatgatatttagacacttcaaataccttgatctcaaagttataagacaaattggtctgagatgtcctgaatgattcttggatcattctccaagacagactgaagacacaaagcaaatttgtgaggacacaaagcaaatttcaaaaacttctaaaagtcttaaataatagaaaaactcgtctttgactaccatgtattaaaatcagaaatcaaaacagaaagaaaaacaaaaacaatgcacaaataatatggacggtagacttcattgtctaaaacagttaatggacttaggaaaccagagtgggtttatactgtaccctgagtgctgtggacatgaaagcaccaggctaaagcctagggatacagcaaaagcacagagcagaggagcatctatagctataaatgctcacagtaagaaagaaggaagatcttaagtcaataatttaacaaggccaagaacatcagggaagaaaagtaaggaaagagaaaaacaaacaaacaaacaaaaatcctaactctccagtggttctcaacctgtgggctttgacctttggaaaacacatatttccaaaggtcttaggaactgagatactgttcagtagcaaaattacagttatgaagtagcaacaaaaataaatttatggttgggtgttcctaagaccattggaaatatgtgtgttccaatggttgtgacctataggttgaaagtcacttctggactaaatgtggaaaaatacttaacaaaatattaacaaactgaatcgaacaatactatgaggttatacacccagttttgctgagtgtggtggctcatgactttaatctcagcactcagaggcaaaggcaagtgaatatccttgagttcaaagccagcctagtcttcatagtgagctccaggatcccagggctacgaaaagagaaactgtctcaacaaacaaaaacaaaaccccaagaaaaactagtgtttgtatttctctacactagcaatgaaaagaaatatagaaaacaaattccacttacaataacatccaaaagaacaacatagctagggggtatatagattagtaccaaccttggccagagaagctttttctgtcatgggcaatagttaatgcaatgactcatagtcaaatggtgggagtaagggactgttgaagactcatccctaaataggacatctatttcaaccccacaggacccgggaaccatcagggaagatgatgtggacagaatataagagacagagaatgctgaggggatgctatgcaatgctgactttaggcatgacattacagtttcactcatggttacctgcacaagatcaagccaacaaagtcagtcaacatcccagcaggcatctcagtgggttacagaacagcaacaacaccccacaaaacagctcagtttcaggcagataccccatatgagttatttgtcagggaggccccagaggagcctcaattacactggctattgaaattgctcttggttgtcctccatagcaacatggtaagaccctattgccaaaataccactcatttggaatccaggacatagagaaatcaactgctatcttacagggacactctcttcctgctggctaacttgcatagtgccagaaggtgctgtgcaagctgccaggggagaaaagatatcaatggtctctctcactgctggaccctgtttgctgcaatgctgatatgtgggcaagatatgccttctggttcagttatagcatgaaaggttaaggggggggcgggtaactattttctgaccagatgtaaggcctgatccacaggaaagattttgtacttggtatgttcacatggttagaagactttgatgggggaaatcataggccctggacaaggaagagggaacctactattgtttgctagcattttgccaaatgttcattctcccaaactgagttctaaacatttgtgtttatacccatggatttgtgctgctctcaactttggtcagggaagcttctttttgcaacaggtaattaatacagagactcatgactggccaaagtactgggtctaaacaactgtgggtgctcagttgtatcaacttctcaccatctaaggctcagggacttcaaagaaaagggagagaaaagaatgcaagagctgtgaaaaactgacttctagacatcaaagggatgttgtatataacgactcacagcaactggggttacctgcagaagagaaggcagtcaaaatttcacacatatcagaggggctaatggcaactgatggctgtcgagggagagtcactgtcctttggagatgtggctgataggttgctcatgccccagtggataaccacacactgccatgcagcactaattggactcagagggccattgatgggcagcctagataaaagaaataacctgaagctgagagggaggtaaagtggggggtgagatgggagagagggcgcggcaaatggatgtgaccagtgaacattgtgtagatgtgtggaactttcaaagaaaataaacgtttctatatagcaaatgagtctattaatcaaatgtcaaaacagctttcacaatggaagagaatatttacccgtcatatatcccagtagtggattaatacctagaatatgcgaagaactaaaaaaataaaaaacactaaacatcaaaaaccaaaccacctaatcaaaaatgggcgctttggaaatgaacagagaatttttcaaaagaagaaattcagaatactaataaatactttaaaaagtgttcaatatcttctcccatgagggaatgaaaatcaaaaccattttgggtttccatttcaggccaatcagaatggtcaacatgaagaatacaaatgactacaaaggttggtgaagatgtgtggaaagagaaaccctcatccaatattagtgggaatgtaaatgtatactcaacaaaatgaaaaataggacttcccgatgatctagcaatgccaccccagggtatacatccaaagattccacatcctaccatagagaacctacacagctaggctcactgatgctctgttcacaatagctagaaatggattcaccctagatgaccattaatagatgaataattaaaatgtcatacatatatatgatagaatttttattcaattatacagaaaaatgaaattatgaaaatttcaggaaaatgggtagaaccaaaattttcctgagtgaaataatcaagacctaggaagacaaatgagacatgttctgtcatatatgcaagttcctatcataatattttcattattttgtttttagtttttaaactgaaaaaactttggtttacaaaaccaaaactttttgttataaaacaataaccctcaggcagctaaatatttccaaatgtgaaaaattaaagaaaaagaaaagacaccgggtcaaatggatatccagatacaaaagaatgaagctaaattcctgcctctcacaccaacttaaattatgtccgggtgtggcagcacatgccattgatctcaacatttggaggcagaggcaggaagatctctataagttccagtccatcctggtctacatagcgagttctagaccagtcaagactacaggtgaattcctatcttaacaaaactcaaactatgtgaagtatctgtaagagttaaatctataaaatttgtagaagaaaatctaagggctggactggggatacagccagtggcagtgtactttcttagcaggcaataaagctctggatttgaactataaacaatcaaaggggtcattattaatgattttagcaatatcagttaatgatatttgataatagatgcttagatctgataccaaaaatacaagtaatgaaagaaaagtaaaaaaggtaaatattatgtcaaaataaaaaaaaaaaaagtgtatcaaagagtgctagaaaacagtatcttagcagcagatccttatcattctgttagatgagacacagtgggtcagccattgtacgctttcatttagttgctcaatggatgcagaaagtataccggggttggtttaggagatggggacaggaagatatgggaaaacgggaggtgaagaacagctttctctctgtgttgggtttgctccaaaggacacaaaacaaaaactccaccactgactgagctacatccccagcctggaattttctttctgagcgatggatatttcgaaccagtagactcgatgattgcagcacacgtgccatgcacatctcatcttgaaactacaaaaagaaaggccttagggtgagcaaaggaaacaacgtgagctagatctggagtgagggacccaaagcggagaagtgtgaggcacggaaggctggagatgacagtggggacagaatacagagtctgagcaatggaaagtcatgtgtctctgagcataataacaacatgtgaaacagcaccctgtctttgatgaggtaaaacagccatttgaacatgcagatggttgttaaagaaacgataaccgtactgcagcggcaggggcgcgggcggggtgggggcaggaggcatcagacaacaaaacaacctgttagcagtagaatcatacacacttttgactcaaaaaatttcagaaccagggcggcgggtgtagttcagtggtagaatgataacacgctcgaggctctaggtcggatccttagctgcaaaataaatggaagaagataggacagaagaggggagggtgggagggaaggagatttcagagccagcccacgtgtttttcctttacctattcatccagcccctgctcttccctgggcctccgataccggtatctgcgtccttcatacccacccaaagagttagttcctgctttcctctggcactaatttctgtgggactgaggttcagaaccttgatagttaaggtgtggtccacgggcaggcaaccctgataagtacctgggagtttgttagaaaagcagatatttacagcttcctttcagagtctccagcctaacaaaaccctcaagttataaatacattaacgtttcacaaattcctatgtagaaagaatagagaagtagctgagatacaccaaggagctcatttcatttgtaaccattgtttttctattttggtttgctgtgtcgcccaggttgcttcagtatcttaaattgggattaaaagcatgcaccatagccgggggttggtgtgcacgcctttaatcccagcactcgggaggcagaggcaggcggatctctgagttcgaggccaacctggtcttcaaagagagttccaggacagcctccaaaaccctgtctcaaaaaaaaaaaaaaaaaaaaaaaaaaaaaaaaccccaaaaaacctattaattatatgtggtaataggttttaatatattttgatcatatttacccacagtaccctctctgaccccttcccactcctgttagtctccttctaaactaacccgccttctatttttctttcctttttctcctctgatgagccaatgagtttcttagggttgcttacaggagcatgggttaaggggttatatacagacgccaggacatctgacaagtggctacatcactgaggaaaaaaaaaaaaatctctccctccccaaccaaccattaaacacttaaaagtccctgaggcaagggatgggcctgattggtctccatctccttgacagaatgttgttaagcctaattttgtgcatgtcttgtgctggtcattacagctgctgtacatcaaagagtacaactgtcatgtcacatggtaagctggttttgcccccaaggaaatgaattaaagggaatgaagggagctggggtgatgcataaattggcaaagtgcttgccatgcaagcaggaccacctgagttcagattcccaggacccaagtccaaagcctggtgaatgtaatgcaaagccagtgctgtaatctcagtggctggccagccgggaggcaagaggaaccctggggaggcagggggagttctggggaggcagggggagctctggggaggcatggggagctctggggaggcagggggaggtctggggaggcaggaggagccctggggaggcagggggagccctggggaagcagggggagccctggggaggcaaggggagccccgaggagccctggggaagcagggggagccctggggagtcaggaggagccctagggtttactgttcggtcagcctagccaaatgagcaagctttgggttcattgagaaccccatctcaaaaaacaaagggagagagagaagcagctgtcaaagccactcaatggatgccccctactgcccccattcatttgtaaacacacaggaataagtaaatgctcatatatgcacacaaaaggaaataagattagatttccaacatgatttatctttgaactaagtttcctaatggaatcaggatgtttctcacctacctgacagcctgtagtgagtcattctctccatctgctgggagagcatctttgtcctacctgcatgctacagtggtcttgtctttgctcactcactccaaactcttctcctaaccctttccctctccctctcatgttgctgtgtttgattccttccctacttaaccgcatatcattttcacctattccagaaagttcttcctcaccaccattccagagcagtccccttgtttttggtgtcctgcctagttttaccttagaaccagactctccactttccaccccaacaaccacagttctgctccactgagaggtttctgaccacctgcatctgtctcctgcagatgcagtcaactgtgtactttacaccctcccccacagctgtgtggcagtgaactgtttgttacttaggctctgcaccttctttggtcaaccacacatggggactgagcctcatatttcacaggttggttataagaagaacccacagagatacggaggagggattttaataagaggactctcagaaatttccagtttacagagataaatgtgaaaaactcaagttgctgcttgatcccaggtcaggaagtgataacacagatgcaagtacaataattttcatctttctctgcatcttgtatgtatttccttgttcctctgttcttcctagcttgacttagtctctattctcagccttagccttgtgcctcagtttctagctgctttcaggaatctcctctcagctatagcactgaatcataaaacagatccaaagaagagctgaccttcctcctcgtggctaggcctccatcctacccctgtctctatctctgactgtcctgtctgcaatgggacttccctctgtctgtctgtctgtctatctgtctctttttctctctctttctcactcatttcttcaaaattatttgttgctagccagtgcacgttttatttgtttcgagcttatcttccctgccaagaagttaattccttaagaacagaaactttgtggacttagatcctgatgtagttcctgaaactactccagcctatctcgtaggcatttaatgaatggttatcaaatgacctaatgaatcttcctttcctcttacttcttttgtcaattaatctagttagttctatgtctgcagtttttcttgtattactgacaggtttagtcaactgtttttttcagcctcttgctggctaatgaacttttgatcagttacttaaattatcatagtctcagttccttgtgttaacatgaagctattaatagaacaaatgcatacacatgccataagacttccaaacataatgcatttttaatatctagcccattttctggagcaaaataaatgctagcttttttttttttttttcagtgaactcctccagggctaggtctgagttagcagcctttggtaccctttctgagaacactacactacagcccagatgccaccctgagacttctcaaacatgatgtgagcctttttgccctctgtgtaacagataacagggagaagaaacagacccagccaatccattcctaactgcagtgctgggttttcagtatttgattgaaagtgaagttcggaaaagacaacgaatccccctgacgttacccagtatcacagcagttaaaatgttgaagattttttccccctttaaacttacttttgtaccacaaacagttctgacttaaaaagactcatggaaacatgctcagaaaacactccctttccgtcaggcccagctgaaattttgcccccaaatcattcctctggcagtctgagggaagcggtttgctatgaaccaccttgaacttcctgagtctctgacagagagccaggcagtcagcccgatctagatgacttaaactgagtgagctgtcccaaagaagggactcactcacacagcaacagtatcagtgtccacagacatttacctgagccaaggcagaagacaagtgggaacagccagaccatcatctgaccggcggagtcaggcgcgggagtccttgagacaaccattctttcaccagcttgtcactgagacttccttccctttcgtctggtgatgacagctcttcctctatgttagcaagcctttgcttatcgattttcactttcacacattgcatatagaaataccttgtataagttaagactcctactaatgggggttacagagcctgaaatagccacttcctgtaaccagataggacttccagaggagggactgggacacgaactcagccacaaaacctgtgacctacaaatttgtcctgcctgaaagctgtgctgaagtaaagttggtgcagaaactgtgggagtggccaaccgctaactgggccagatggagacccatgccacaagaaggagcccacgcctgacactgcctggaggtccaggaaccaaaggctagatagcccagcctttagttctatctgtatagaactaaatacatccagggaaaaaaagtcaatgatgcctaatgatattgtgctatactcatgggcacccagaataatgatcatcagagaggcttcatccagcaactgatagaaacagatgcagagacccacagccaaacattagcctgaacttgggatcctgcagaagatggaaagtattgtaggagccggagggggtcaagaacacctcaagaaaattcatagtcaatttaacctgggctcacagagactgaagtgacaatcagggagcctgcatgggactggcctagaccctctgcatatatttacagttagctttgtgtttttatgggattcctaacaatgggagtgtgtgggaggttgtagggggagggggggagggctgtccctgggtcttttgcctgattttgggatgtcttttctcctactgggttgcctagtccagttttttttttttaattaatttattttttacattccaatcccagtttcccctccctcctttcctcccactctcccctccttctgccatcccaccttccatttgcttctcagagagggttgtgcctcccctaagtctgtcccatcatcttgttgaggaagaaccaaggtcccccgccccatgtctagactgagcaaggtatctctccatagaaaattgggctccacaaagtcagtttacacattacagttagatcttagtcccactgccagtggcttcatatacaccccaagccataccattgtcacctgtattcaggggtcctagttcagtcctatgcctgtttcccagttgcctagtcaagtcttaatatgaggggagatgcctagtcttattgcaacttgataaaccatatttggtcagtatccctgggagacctaatcttttctgaagggaaatgaaggagaagtggggagaagggctgggaggagatgagagaggggtactgccgtggggatgtgatggaagaatacattaaaaaaaaaaagaaatagtttgtataattttaatttaaaaagtgtagggagacgtgtgtcatgagctgtctatgcatttgagaagatgttcaccttgtctgtggcatcttctgtgatgtctgtcagatcatactgtttaagtgttgctcaggccctttatttaaagacttcctgtagttctgacgccagatgattcatatgctggaggcttggtctccagtgtggtgactcagaggggtggtgggacccttacgaagtgggtcctactaagagactattatgtcattgatggtgctttgacagtgggcttttccggtatgcaaatcccttagaccacccatacacctacagacaacccctcacccatgcaccgttcagtaaccccatgaactaatctagacttcgtgcgggctgtttctttgtcttgttctcaacgtcctatctggagtgaatagagttacttgttcaaatctccagaggaaaaaaaaaatagtcacaattggtgctggagctgggatgaacaaaacaaagttgagtctgagatggaggcacatgcgagagtgatccaactggtatgattactctttcccggtggtatgggacagcatgcctccctcctgcagtggcagttgtatgtcctctgatatgaataagacatgcagctgaagggaacatctttgaggggaaaccctatcttcctctatgcggtgtggttggcatgccccttttatgaatgtggtctgtcaatcaagcacaggaatgcccccaaggtggttgatggactagagaatctattgcaatcccagaaaggacccatatggcatgtgattataagtaggtcatagaaatagacccttggtctctgctggatgccataagagctgtaattgaggttaagatttctgcccaggaggaattgccagcaggaggaaggaattacaatagaagagacacacagatgctgtcttccatattgccttctcatttggcaggaaaggagggaaaagaaggatgggttcctattctttttttttttttttctttcagtcagtaaatgagaattcattagacctgggctagagaacccttcctggaatccaaaactcttgatccatgagaagaatcagacagtgaggagtgaagagatgaagtagaagatgtccatccttcagacctgacttttaatacataagaaggaaaatctgtgattcagtgtgcatatagaagccttgatctccctggagagcagaaagaggatggcataggaggttggcgaaggacaggggaggaggggagggaaagggaactgggattgacatgtaaaagaagcttgtttctaatttaaataaaaaagaaaagaaaaacaaacaaacaaaccaaaacaaaaacagctgacctgaaccaggggttgctcatggaccccagactgataagttgggaaaccagcaaaggactgttccagaccccatgaaggagggggtccagtttggaggtctggacaacctatggagccactggtagtggatcagtatttacccctagtacacaaattaactttgggagccttctccacatagagggatactctttcagcctagatacactggggagggtctagggtctaggccctgctccaaatgatatgattgactttgaagatcccccatggatggcctcagcctccctggggagcagaaagggggcaggggtggaggggagggagagggaactgggattgacaaataaaagaaacttgtttctaatttaaataaaaaaagaaaaaaaaaagaagccttaacatttcttagcccaggaaatgatgctagtcaggggataattggtccttcaaatgcttcaactgggagagacttttaaataagcaatagaagaacttttcaaagcctgacttgggaggtcatgggacatgggggagtcagatgggatcagcttgacattgtggaagtgagaaattgagagatatcatggatttttctctttcagaaacaggctgaatagtttgaggcaatgtaagggaaaccattcccaatgaagtgacttatatgaacaattagggaagcttcatatcactggctgagatctccatgaatatcagggactagaagacaatacagggatgacagacattgtctagagaactgtgtatgcaagacaaggtgtttgatgcccaggtgagcaaggagagagaaaaacattgatttagcaggccccctgggactggtatagggcaagtggctttgctgagtctgttgttacattatgatctttacaaaaattggaaaagccgtatgatctgactacagtttgtgcctatgtggttgccgaggtatttaggaagggattagaaaagggaaacctgggctggcgaggtggcccatgaggaaaggtgcttgctgccaagcctgatggctcaagtcccattcttggtacccacatggtagaatgagagaaatgactcctgaatgttgtcttccgaccactcccaacacatacaatgtcacagcatctgcccccataatcaagcaaacaaataaataaatgtaattttaaaaaggatagagaggaaagaagataatggggtctattgccccaaagcaaatgtagacaaattctgtgcttgtgaaaggctttaaaacccgagtaacaatttgcaagaggggtgtaagaaggcccgaatgacaggtctttgtaagttggaaaggactggtcagttacccccagcatactgtgcacattttcccctgcaggaaaggatactgggatgtaggttgttcaggatggaattctttaagacttcgggggtgattgatggaagtggtggccaaggaggcagcctgaagcctgtctgatgcagggagcaggctcatagtgggtgtgatgggtgacaacattgatctgctttcccttgcccctgggcagagtgtcacaaagcagccatatggagcctatcaaggttggggcggtgtgtagctccctagggtgagatactggataacgtatggatgatatgattatggattataaagatctaaatgatgtggtgtctccatccatgtatctatatcgaattttgaaaaaaaaaaagttggcacaagtgatgggatatttttcatgctctattgctgatgttaaaaataatccctctagacagaattccaagaccaagtagcattttcttagaagagacagcaatggatcttcagaggccctgcccaccctctgtgaaaagattcattatgtaacgctaaactttgtgtgtcttacaaatttggaaaatcatctggaagggcagtaaaaatggtagatggaaagtttgaagaatgcagcctgtgtgggtggggaaaaggcacttctaggaacacaaagttgttgagataaaaaagatgtgtgtgccaggagtatattatctcttgatcaattattggtcagggaggtccatgagggtccccataaaatataagctttcgccactgctgttagctacatgccagaactagatgctgagtttctacaatcaaagactgtgtgcttttgttgcaggacgttaaaaataatcaaatttggactaaatcaaaagctcatttcttgttggttagcttttgtagtacttgaaagaactataacagaattgtggagaagaattgtgaccaacagtcctgcttggtgatgtactattgacactccagtcagaatatgccattggatcaaaagtggcacagctgatgcagacacaaccaactgctttcttctgggatctcaggttcacctcacaggatagaactcatatttggtactacaagccagtaaaatctgtgacttgggggttataggatggaaggaggctaccattactgttttgttaaacaggtattacgtacctcttaatttgccttctacttatgtctatacccacacattactgcagaatttcttttttcccataggtagtgattactgcacaagttgaaaacccgtcaaaatactgagaatgagtggcgtttgctgtggaacagtgcctcagtactcagccataaatggaagaggatgtccagacatcattttcacactgccttagggtcattgtagaagagagagtagaaagaacataacagttggaagaagggatgcagttgttgcaaagctgtttcctctgaatcgaaacatttcatcctggagggaggaggaaggttcacaagactcaggaaactcatcaagaagatcacataacttataaggcttagaaagctcatgaaagcttataagacccgggaaacccatcaccaagtttagagaagcagcaaaccactgtggtaggaaaggagactcttcagtggagcttcctacaagttgctcaggggggctttagcgatgctggttcagccacgcctgggggcgcttttctgtgaccagccatctgcccttgagccacctgtgctactggaagacatccatcacctgtgtacttgaaagcaatcctaggaaactcatggccccaccaagctaaacttggatgaagtggtttctttggtttattatcagtgctctttctgacaagaagggacatttttcgcttatcgccccaggaaaagccacacaacccacggatagcgtatatatgtatactcaccgatccgatctgtttcagtgaatgtatgtaaagcaaaatcagccaagggaaatgaatacacaaggcatgtgctggcaaaagtggctcagcaagggaaaggcatttggtatcaagcctaatgatttgagtttggtccctgaggcccatatgatggaaggaagaggaccgactcccatgagctgtcttctgatttctacaagcatggtggcaggtgtgtgcctccccttataaatagatgaaatagaataattacaaaataaaagggagaggcaagacgcaaagccatttcccgctaagagcttcacaacatatcctcaggttctgaaggttttgtgggaatcacagcctcgtttgttgccttagttcctttcttccaagtggtactatgggtgacaacgctcagctccctagtctcagattctaagtattttgggatttcagaatgcacaggacttgtgctatgttcactgtcttttgctgtttcagctagttcatttcttctttccttgaaaaacaaaaaaagtcagacaaatgaaaagatgcattataaaacaatgcttattttgtttacctgatgaaatggagcctttagtccaatgctttaatcactcacaaagtaaatcttatagataaggaagtttacaaaagggagagataaaaggtgacaagaagacaagacattgtgttactaacttctgagacaggtttagtagcatgtttattatcattaaaacatgatcttctttgtaatgaactaatatagcaaaaatcatccagagaatttaatattcattaagtctggagaactcaaaaaaatatggtaagaaggatccctggccaaaactgactcactgactggtcagagagactgttaaaaaaaatataacaggatgtggtgagtgctaccactcatttaggtatgacgtactgtagaagtaaaaatagaatgatagataattagctttggttggagaatttgagagggacaacaaagagaatatactgagtctgactctgaagacagatattatatgggcaaaagtgtgtgtgtgtggtatggaaatgatttgtcagtttgtgaatcatgataattctgtgtcattggaaccggacagccacaggatgctaatctttcaggggagtgaattccagtaaggaaagatgaaacagagttactgctttttatgtgtgacagttcaggcagcacatgacaaggccagtaggcatgcaaatggggtatgtctgagaattaggtagatggaggagatgagcttgagatgagccacgtggaggagttgggattgacagaatccattcactgattacatgcttagggaaactgtgaggcagaaagaaggaagaatcaacattttgcctattcagttaaatgggtgacttaacatttctgtgttaagaaacatctcagtttcttaatccatgacacaggatgatgtatctatttcagaaagcagatgtttctcaagagctgtaagttagttatgtccaaaagagcacagagtggcacacaccgtgcactgaataaatgtgagtcttcatgcttacttaacatcacttagcacattagatcatcacctagcacaaggaaaacagggcagcaaggtggggaggtcagcgaagactcagttcaatttggggcacattaaattagaggtgacttttgacatctacaagaagatcaagggtgggaataagcaaaagtgtaagggttgagagtggtgcatatttaagaaatgacagatggtttataagaaaaaagacatgtctccatttctcattttcaaagagacaaccatgtttaggttagagagtggagccacctatacccagagacttgtatagggcttttgagaacagactggacagttggtcagcaaaacttcgctaccatcaggaatttcttcatgcgttcttaaagtaaatctcttgaggtctgaaagcctctagataatactctgctcattattttgtttccttgggttagaggtcaagatttctactgttatttgtataagcatcttaatactttaatatattttgaaaaatctcaaaggcttctcatactggcaagcattaactagtacagtgcaatcctccaaattcttgcttcttctgttcccgttatttgtatgatgttagtggtggacatacacactgttccctcattttgtaaaaactcaccagaaacatgcatgactatgatcccttgtttgatatgaaagcagctttccccagatgcagccaaaaagttctatacaagcttctttagtttgatggtcattatgtggttgaccacatgacaatggaattagcatgtcagtatatttgcattgatttactttaagtagctttaaaataatagtctaggcaagtattcattcaacagatgtttggtgatccatctattatgcaaaagtgctagatgtgtgctatgtctgagatcaagtgtcgagcattggggtctacagcaggtaaatggaggctgtgtgtcagggtgcaaatgtatgaaatctcacattcaatcctgtcttcccggatttctgattttgccaatgtttttattcccttagtcttaatgcaaactagaagaattattttccactttacagggctgttgtattgactacaatatacaatgtagttatggttgacatgcaaaataagtcccaagtgaattgttacaaactctttgccctgcaagagttctccatttcattttgattattttttagatacagccattgtcctttctgtctctttgaggagacaggtatagtagtaggtaagtagactggtatgtgtggaggacagaaggaacagacaggcctgtaacaaaataaccttagtcacaaggaatggatgaaaaggatccaggattttctgtgttctggcatattcttatagtaacaccttacttaatgctcacaatcaactctgctaaggtaggtactattaactacgtccatttttacagatgggcatcctgaggacaggaggttcaagtgacttgctcaaggtcactaggaaactaggtttagatttaggtactccagtgtcagagcccacatttctgatcattcgtgttttcttatgtttgtctttgtttttcaagcttcatttatacccagtagagactatgttcttttttaaaaatgcatttatttattatgcatacagcattctgtctgcatgtatgcctgcacaacagaagagggcaccagatctcactacagatggctgtgagccaccatgtggttgctgggaattgaactcaggacctctttgaaaagtagccagtgcttttaacctctgcgccatccctccagcctcccgagactatgttctttagaaaattatacaaatcaagggaaattcaggaaaaagtcaaacagaaaaataggtataaatttggaagaaactctggcttagtaatttcttctcagcaagttttagctaagactggtctctgttgatctagcacgaaccacatgggcttcttcatgcctgtagacattttccaaggaggcccagccaacctcttctcttgtgtgctgtctagtttatgcatttttttagattaaaaatatttttaaatagttcaattttcccactccttgggaagcatgagtttcgatttctcatttacttagtttaatactccatgaagcctagtatttgtgaagaggggtcatcctggctcaccagcacttttcactagagggcactgtgttggacatctcaatgtgtgtgtgtgtgtgtgtgtgtgtgtgtgtgtgtgtgtgtgtgtgtgtgtgatggggggcgcacactgtaggctagtaagagatcctgtcctattgaaagtacactttgacttttttatggacctattggccacaacctagttcatttagaaagatttaaatgagaaaataatataattctaatttttcagaagaatctgaggactgagagtcgaaaggaaggagtgaatagcttatatcttcaaaaatcacaagattcctgaaaaagaaacaaatgtaggctcttcctgagcccaaaggccaccttaagaattcccatgcttcaagaggtccactgccaagcactgagccaaactcctggaatccagtttcagagagggaggagtgatgaacaaaggggtcaagaccacgctgggaaaatgcacagaaacacatgacctgagcaagtgggaactcatgaaccccagtctgacagctggggaaccaatataggaccaaaccaggccccctgaacttgggtttcagctaggagctctgggcagtctatggggcctttggcagtgaaaccaggatgtatcctagtgcacgaacggacttcggaagcccatttccaatggaaggatactctcttagcctagatacacaggggagggcgcaggccctgcctcaaatgacttgacagactttgatgatcactcatggaaggcctcaccttccctggggagtggaggggggatgggatggggggttgtagagggatatgggaggatggtagggagatggaactggggttgatatgtaaaataagattgtttcatatacaaacatacatacatacatatttcccatgcttcaaacaaaattggtcttgtagaatgcctaaaaatcgctcacctttggtcctttctatttgccactatataccagacctttaaatgtgggcttattagggagaggaaggggcaaagttggagaccgaggtatgtccaagattcctcagctcaactacaggatgaggagtgactttgaggaagtcaagtataactttgactttaaggccaagtctctgcattcctttctatgtgtaactctccagggcattgcctcttcatgcctagctcaccatctcagctgacctagtgtggagggcatgttccaaggagaagaaaatatttttgttttttgtttttttaaaagatgggagtctcatgtagcccaggctgaccttgtactggttgtgtagctgaagttgtctttgcctcctcagttctgggattataggcattcatcactgcacttggctttagctgacctcttggttgatctgtcggaaagtcttttccctccaaatacccttacacttcggctatagctgatgtcttcatctttatgaataatgtttagtgtaaattggctcccctatgttatcagcttctatccatttctgcattcaatgtgtgcctctgagctgactcacttggatttctattcaacagcatttactgctctctcacaggctacaatgtgttatgttggcttgtggcaaatgcaaatggaaattaagtagtaaataagagtaacatattttttgaaaattgtgtctgaccagccactttggaaatcagtatggaaattcctcaggaaaatgggaatcagtccaccacaagatccagcaattccactcttaggcatatacccaaaagaagcacattcatacaacaagaacaatctgttcaacaatgttcatagcagcattatttgtaatagccagaacctggaagcaacctacatgcccttcaactgaagaatggatagagaaaatgtggtacatttacacaatggaacactactcagcggaaaaaacaatgaaatcttgaaatttgaaggcaaatggatggaactagaagaaaccattctgagcgaggcaacccagttacaaagtgacaaacatggtatgtactcactcatatatggattttagacatagaacaaaggattaccagcctacaatccacaccaccagagaagataggaaacaaggaggactctaagggagacatacatggtcccctggagaaagggaaagggacaagatctcctgagcaaattgggagcattgggggaggagagaaggagttaggagaaaaagaaggggagaagaggaggggtgaggaggacatgagggagcaggaagattaagtcaggggaggaatagaggagagcaaaaaaagagataacataatagaaggagccattgtaagtttaaagagcaatctggcactagggaaatgtccagagatctacaaggatgacaccaactaaaatctaagcaatagtggagaggctaccttaaatgccattcccctataatgagattgatgactaacttatatgccatcctatagccttcattcagcagctgatggaagtagaagcagacacccacagctaaacactgaactgaactggaatccagttgcagaggaggagtgatgagcaaagggctcaacaccaggctggtgaaacccacagaaacagctgacctgaacaagggggaagctcttggtccccagactgatcactgggaaaccagaatgggactgatccagaccccaggaacgtgggtgtcagtgaagaggcctcggaaatctatggggcctcttgtagtagatcagtacttatccctagcctaggaatggactttgggagcccatttcacatagagggatactccctcagcctagacacatgggggagggcctaggccctatcccaaaggatatgacagactctgaagacccccatgaaagacctcactctccctggggagcagaaaggatatgggatagataggatgttagttggggggcaggggagggagagagaactgggattgacatgtaaaacaatcttgtttctaattcaaataaaaatggagaaaaaattgtgtctgacacacagaggaaaacaaataattacttcttctgtaagtcaaaatgaaatgagttaaagtgaaataaggatgaattggggaggggtacagaaagttcactgctcatgccagggaaagcctcatagaggaggtactatttgaggtgggattggaggacatgtaaacagacagggctggggacatacatcctggctgaggtactgtgttataaacaggcaaggagcttgagaacatgtgtggtgtctctgaggaggttcccacaatgcattctacaatcactggtatcgtcatgatctcttattttgatggttcgcttgcacccacttccctcagggtgtcagaaatgtagctggacaattctttttggagagtgaggctcttgggcatggtgtcttcttgccaaggctgtctgaagtaatacacagggaaggtaagcctggtcagaaaggaaaccctatgaggcttctgaagacctccggcagtctaatttctacagaaagaacatactctaatgttacacttagacaatgtatctgcctggcttagggccacaactcacagctttctaggtagcacagtcatctatatttgggctaatagtggcagttgtgtcctgcatggtggttcctgagctgagggatgtgtaggggtcgctacagtggcttgccatgtgttcaaggcatccaaggacgcctttccaaagttgcttaaggtactgtagcaattggtagaggccttgcatcagggtttcagacacacgttgagtctgcacagaacatatagctggtatgccagggggtgttccaggtgtccaaatattgattgatatcttcccaagatgttggacagtgatgctacatctaggcatgagcatcctccagctatcttcagtcttctgtaaacatgaacaaccttcatgatttcttccagtgtgccataaaaatatgtttacatgttctgtgatgtgtggaagtttaggagccatcatatcagggataagtaggggcaagtgtccataagcccatctgggtaccagtaatgcccagcaacagaaggctactctgcttgtgtgtttggacgtggtcatttgcagtgccctggtaagggatagccaaaaaaggtctagatctccaggacacccacgctatcactggttgtaacttcagttcccagtgggagaacactgcctgctcacctagacgataatttcattacccaaagtcttgggaggtctgccatcacttgtgtcgtttttccgcatctgtgtaagagagggaaataaggaagcgtgttagctgaaaggagtggctgggtaagtccagccccatgaggtaccaggagagttaaggaaatggcacagggtgatgtcttagatttcccctgtgcttggggacatctgggatggcaaggctctttggtgagccctttgcctttgctccagtcaccccatttgggagcctcgggaacttcttagcccagaagaggtaagtagaagggaataggggtatttgaaattggttttgattgttaggcttcaagcaacattcaggctgcattatttgttcctagttcatccttagttgttctattctccaacaattccattttctcccctacatagagacaagtaactgttggcatctcatcaccaccaatgtctcatgtggtctagtacttcaggatgctgtgaacaacttccccgttggcttgaggagacttgaattttgatggatgggatacactagggtggggagaacaaatggaagaagagaggtaaaaagccacacaggatttaccttctcagaaagctgcactgaggagtaaatggtgttcactgactcttccttgtgggacagcacctggaaaagagatcctttgccctcagcgcgagtgcagaagacaaaccttaagattctcccaccctaactccactctctccatcactcacttctgatcccaatttttcagcatcacttcttgttccctccgactttggattgggttagggtagagacgaggatgagtgggtggcagctgggcacagccctgtagcaaaaacacctccaagagccaagaggagggttctgtgtagtttggactgagtcttgctcagttgggagtttggttttctgcgacttatgtgaatctctaacagcttcttgacaatttaagctcagggtcagactaaccagagaaagctgagtgtctcccttcagtccttgcagactccagaggaacaggcttgtgtaggcatggaaaatgatctttagtggaggtgaggcccaggcaggtagacaaaaggcaaaaggtatggatcacagtgaataaagaatctgagaaaataagcttctgatagaccagctagtgtagttaaagatttctatctttagttatgtagccttgggacaactttccaataactttgccctgttggaaatcccatgacatccctcatttcacaataaggactccttcattgtttgattcctctggggagagcttcttagacacaaatcacatctaacccacagctcggggtcttataccatagaggttgccatgaggagacaatggattacgtttgctttcatagggagacccatggcatcatttctttagcatagtgtttctttgtgggttcttccagattcttggctgtagcttctttttacgaaatggcaaatagagggcaattactgcccaagactcctattttgctggtggtagtggtagagtgtattcaaggtagcatcggctcaccttgcactcaggaatttcatcatagattctagactctgtgagacgatcatttcttgacattttacggtatgttgtttctcttgagacatcacctgccacaaataaacagaacaatagtctgtgaaaggtaggtaggtttttaagagactgtttagtcttattttatctttctgtgaaaaagaaataaaacccagaggtcaactggcccctgccctacagagaagggtgcctggatcctcagatggtctttccataccaaggattacatgtgtgataggacccatctcattcaaatctcaccgaaaacccagtgggaatgccttttcattcctgaagtccagtttagcccgaagagaatttccccagccctgtatggaattcaaagatagctctggcattgatgacctgtcatggctagtggactttccatgtcagggtctcagttgcttaacttgattgattttaattatagtcagtgtcttattatcctgatgcatagctgactataaccacaaacattcatgagttaggtaagtatttattaagatattcatttgtgccagcctccataggaggcctcagagaaacagagaaagggtacatagatccttacttttcctgagatagatgaggcattaatctcaacatatcctttttctttagtattaacacaatgctttaggatcaagttgaaaagagatagctagaattttgttccttcttattacaggacaccaaaaatatgtacaaataatgggtcggattagagattatcacaggcttcagtatttcagagctagtctggtctctgccctagacttggtgaggcagccaaagtgatctcaatcttatttgtgggtgcaaagaatagcctatatgtatctatctgtctccatctctcgcatctcatctgttttggtctctctttcttactccttcagttgcgagaggaagacagatgtttcattgagcaaacttagaaatcacgccaaagggactatgacatttcccttttgtgaatccatttgagttatgatgcatgtcataaaacctttgccttagaatgccacctctattccatactcaggcctgccaattatacacagaggaactaatgtttacctagtacctgtgtatcaggggccaggctgactatggcatgtgtgtagtctactcaataagtatatgcagtaagccctattattatggattatcctgcagccgaggcagtggaatctcccagagctaaaaataactggtcaaataatagttgagatggaatttcatcctacatgtatttgtcacagtaatgagaaaaggcaccaatacatcaaaggtctactttgataggacttggggaaagtaaaaagagaacagcccctccccccaacatagtttgtaagaatgaagggccacctcactctcaaagtgccgtgcggttggtggcagcagcttgtctagtgtgaatgtgcccatgatgtgaggactgaccctgacctctcttctttcactcctttcccccatccaagcattgctgctgctctccagagcagattggagcagagctacttgctgatggtgcttttgcctataatttctggctccgggcaatacttcctgatccagaagatccataggttacccagttttctcctggatggtgagtcctctccttacccatccgaccaattcacaagtgtgacactgtaaaattttaccttcaaggttggtttgacttcaccagctggagaggtttaactcttgagtgaaaacaaatttaacctccatgcaccagaagagtctctattctcttgtatttttggttgtaaggctagccttttaacggctgagccattatctctccagcctgagggtctattctcaagtgacaccttagtttacaggcacatctccatggagccagtacagtgtggccaggtattgtctttgacacaagagttctgttgctccctcaagtggtgcattctgggtaaaaacttcacctctggcagggcccacataatgggtctcaggcccattgtttcctctgacgtagccctgcgatgtatgctgaagaaatggtacaaatttgagtcacagattatcaaaagaaaaaatacctcccctagttttactttgcaataaaatttgacccttaatgtccactctcaggtcaagaatattaaccacctcctggcacatcgggttgtaaaactgggtattacaattaaatttctattgtcataatttaggtaaggacatagatctcttatatttaagccttcatggcctcatcacagtgcctcaagatgcaagagggatgttgtatgtgtcttactagattatttcacactagtccatctcctttaaagtcaactgttcacctctgtaggggtggtgggacctgggatcgtggagcctaaaaatgaggcagattcaagcctcaaacaatagccaaatgtatcagagaatttatactctgagggttaagaagagtcacctaagtaaagcctatagtcacaaggacaagccaaatgtggaaaaaccatgtttttccatagaggcatgtaaacacataacaacagccagttgtaacgaataatttgaagtaaactcagtcctattcactacacctaggaggagcaaaaaacacattcgaagaacaatcccgtgctttgaagaaattgggatcacaagacacttgtcttgttttcttgaagttttctcaaaaacactgagaattctcctcacatgactccattcttggaccttgttccaacactcaaccacagaggacatctttgatcaccctttctttgttgtactcaagcccctgctcaccagccactccatctaacaactctgctttctccccaccttaagttttaatcccctcactccttctctgcaaacagcgcctttccttaccctggtcttctctttccctcacacagtcttaagaacttcatataaggaattcagggaagaatgaaaaaccgtcctccattctttcccctcacaaagtggctaatggggacctttgcacatttggatacgtatgtacaccaagccctgctagatattaaacaaaaccttcaaaaactagaccagggatctagattcctttcttgacttcatgagtcctccaggtctttaataaccaggaggatctatatatctatatattatctaaatgcctatctaatctaatctatctatcatcctgtctgtctgtctgtctgtctgtctgtctgtctgtctgtctatctatagattaaatagatagagtgagccaacctctgagggtgattctttctgaagggcacatggggctgaatatcccagttattacctcttctgggtcagtccatcagcagaactaccattctctctggtccctgtttacttagccttctggtataatcgatatccttcagattagaagcctttaaactccacaaggcattgttgtaggagtatcaaccattaccatcaatgttggcacctgtctccactgtgatgagttcctagccaatagtgatgccttagtttgtcctttaaattctcaccacttccttctctaaaataccacttgagccttttttttctttattgttctacaaccctatggcagaatcagggacctcagtcagtgccccttgtcaccccatcagttctgatgcagctctagtagaaaaaaagattttctacccttgtcagctaattgggctggatgattatagagtggggggtagagacagggctggagagatgatgactcagctgttcaagacatgccccatctcccagaggacttgagtttattagtacccacactgggtgactcacaactgcctgaaactccaactccagggaatctgatgttttttctggccatttcagtcatggaggtatgcatatgtgcacacacacacacacacacacacacacacacaccattaaacaataaatattttaaaataaaaatgtagagacaaaaaaaatcccctccttcaaaagcataaacactcaccctttaatgatcagaccctgatgacttggggactgaccccagtgacatcttatgattagttcaaatgtccagtgttaagaaagacagctgatattgtaaaatttaccacttaacaagatagtgagatgcccagaaatggaccatataaaatgtcttggaagataagaccaaataatttcctttaactgttagaaagtaacttagttctctttcatgggatattctatctctgagactacttactgcatctctctttctcttgtagcacacattttctttattaaatcttgtgtgtgtgtgtgtgtgtgtgtgtgtgtgtgtgtgtgtgtgtgtgtggtgtgcaggcgctattatggttccactccatgctggctaaataaacgacttcactccctggaagaaagaagacacattctcacattttacctttcaagtcaatcctattccgccatctcttgtacaaatacaacagaaacccaaaaaatggaatgagaataagcagaaggagagcggcagccagtccacttgacaacacagcacggcgaaggtggaaatttggactgtctggaaagagaaattgttgtgagtcttggctatcaggagacagagacaagagtctgtgcaggtttgcccacattcatggccactgtcaagatgggatgccccacgagagtgccaaagctcttcgatgaacagtctgaatcagagtcaaccaggggctcctcaaaaggcttgggaatgattagcacttcctagaaaggttggtttcctccaccaaagctacctgggtgtagatacagccagggctagtgtcagcatagaggaggcatatgtatgtgaagataagtcaaaggttaagccttgaagctcttcggagcgatctctgaggctttccagaagagatggatggagttggttacctgtgcaaagttgctgggcagcgacagagtcagaactgttgctgacagggttctgggcagtacatgtgtaagtcaggttttgatcctcaggggactggaagatttgaaggacattacttctctctcccaagggactccaactgtatgtcacattcttttcttctttctccacagagcacgttagtgtgacattacaagaattgttcaaaaatgttattgaactctgtgtaatttttgcttttccaagccgacctatgaggagaaaacatacaagcctacagtgagctgaaaccagcatctataagctcctgagaatcaattgttaacttttcaaaagtttttatgatagatgttaaacatggaattaaaaattaatatgacaacaaataaattgtaccaaaattacttaaaaatcatttttggtgagttgcacatatagcatgctctgtaatgacatacaagtaagcatttcttttcaaacccagaaatcttaaaatcagccacggtgggggagggggaatcagccataaaagatgtttttattttaataaatgcttttcctatatttatttatttttctgtcactcccattaagcatttaacaagaacttttttctttgctttttgagattataatataattaaataatttctcccttcccttcactccttccctatctttccagagacccctcctttttcaagttcatggcgtgtttttcattatttgtttgtacacatccacatacacggatctattcttcactttctcttttattggaaatagattttttttcctcatataggctataccctgagacagtaaggggtggtgaggaagaaatgggaggagtagagggaagagaaactagtcatggccaaagtttttaaaccgcagaaatttggaaattttgcaattttgggcttgacttattcttttgttaatgatgctctgcacttgagaaagcaatggaggaaaggttgctaaaaaaagatgaatcttaaaagcatatcatgttggtaaccattgcatcgtcaatataaaacaaaacgctgtagtgatctaatgcctgtaaaacatttctttttctttctttctttctttctttctttctttctttctttctttctttttcttttttcttttttttggcctcagcaaaggaacttatatttaggtatgcagatgaatgctataatccttgcatttgggagtgtgaagcagaaagattataaatttgaggctagcctgggaaacctactacaagcattcaaaaacaaaacaaaacaaaacaaaacaagactgaatttgaaaatgatgagcattgaaggtgtgttggtttgaatgacaatggttccagtggctcatatgtttcaatgtttttcaccagggaatgaaactatttgcaacaattaggaggattaggaggtgtggccttgttggagtaggtggggctgcttctattttgctgggggttatagatctgtgtaaattacttatctgatcttggtttaactttggtaagtggcattcaccacaaaaattacctgtttaatttagatcttccaatttagtgaagcactggatttctgaggtgtctgttgttatgctcccccttttcatttctgattttgttaatttgaatattctcaccctgtcttgtagttattttggataaattgtctgtctttttttttttttttttaaagcttcaataagaatctttcagggtttcacattatgcacctcaattctgttctcctccgggtccccccatacttcccctcattcctgttgcatctccctcccccacgaaagaaaagaagacaaagtaagcaagcaagcaaacaaaaagaagggaaaaatagaagaaaaaaaaccattaaaccaaaacagaacaacagcaacaaaacccacactgaaacagcaaaatctctgcttctccttctctcctgcttctccatcacctcttcatctgtcctggtggcattggaggcattggtgtgtcatcagcttgactggcgactgttcattgcaatgagtcattggtctggttcaaggtctccaaccatcctcactggttcttcactggagctcttctggggtatactctgtcttggagatattgctggtatcgttctgcaggaccaatcccctcacaagctcccgcaggacctagatggggtagggtcaacccaaggtcctgttgtgggcctgggtattgttagccagtcaggtcatatcgcgccactggggccacccgccttgggtgcagtggtggagtcatctcccctacatgcatgtcctcagagtaggttcatcctcgcctgtggtgaagggtggagccctccctcccgagtgcaggggccagctctcttgctgcggtgggcagcgagaggtaaggccagctctcccagggcggtggagggtgagactggctcagtctagctctctaatttaatcttacatgattcctaaggcctcctggggtgacactggccacagacatcaacacagaccttagctgcagctggaccatggtcccatacatgacccttgaccactgcttaggcccggacgacaacctggctctgggtggaggaaatggccactctggtgggaatggttccgacagccgtgtggttgccaccaaggcctcaggtttcggccccaaacctgggcctctaagtgaccattattggcaatgcaggacccagatctcaggtcagacccccagccgtcataggactatgaaccccaacatggtccttagagcagctgggtctggatatccccattgccactgaggaactaacttggcccttgatcttgggtgtctgcactgccttccatggtagcaggaacatcggacatcagcacagaccctggctgtagttgggccatggaccctgacacggtcctcagctgcagctcgggcccagatgacaccatgtcaatgagtagctgcgcaagtcactcagatatggatgcatcctggtcattggtcaccaatgcagactcaggttgctggtttgacctaggacttcttcctggcacttggtgtcaactggagctaggtatgtcaatctggaccctggctgcttcagggccacagacccagacatggctctcagcagcagcctgggcccggatgacaccctggttccggatggtaccacagaccatccatgtctgtatggcccctgctgtggcatgactcccctgaatccaccccagctgcaactctggcccagatctgggcctctgtatgggccctagtggtaacccatgccacagtgttcaaggcagaccccagctgcaggtggaccacggacccagacatggcctcagacatcagcttaccctggtcgacatcctttttccgagtgttggctccagacactcagatcagaatggctctgaaggcagcgtggtccctggaccaacaaggcccagaccctaagcttcacgtggcttttggtggtaccgtggggacagggcatcaatatagacctcagttgtggtaggaccactggacagacatggtccttggcagcagcctaggcctggataaaaccaactttttgtttcattgattcttttcttgtttgattgttttctttgtttttattttgctgatttcagccctgaatttgatcatttcttgccatctactcctcttgtgtgtgattacttctttttgttctagagctttcaggtgtcctattaagttactagtacgattcttccccccctctttttttttttaatgtaggcacttagtgctatgaacttgcctcttacatctgctttcattgtgtcccttaagtttggatatgctgtgtattcattttcattgaattctagagtgtctttaatttctttcatttctgtctttttaaaaaagatttatttatttatttatttatttattttgaatataacatcctgcttccatttatgtctgcatgccagaagaggataccagatatcattataggtagttgtgagctaccatgtggttgctgggaaatgaactcaggacctctggaagagtagtcagtgctcttaacttctgagccatttctccagccccttcatttctgtcttgactcattttccattcagtagagagctgttcagtttccatgggtttgtaagctttctgttgttgttgataatcagcttcaatctgtgctggtctaataggctgcatggagttattttagttttgttgtatctattgggacttgctttgtgactgagtatgtagtcagttttggagaaagttccatgagttgtaaagaaggtatatatctgttaggttcatttggcttatagtctgttagttgggtggtagtggtgcatgcctttagtcctaacacttgggaggcagaggcaggtggatctctgtgagttcgaggccagcctggtttacagtgggaatgccaggacaggctccaaaactacacagagaaaccctgtctcaaaaaaaagtctgttagttccagcatttctctgatgagtttttgtctggatgacctgtctattggtgagagttgggtagtgaggtctcccactatcagcgtgtgaaagtcaaactgtgatttaagttatagtggtgtttcttttacagatgtgagtatccttgtgttttggcacaaatgttaagaatcgcaatgccctcttggcggatttttcctttgatgagtatgtagtgtcattccctgtctcttttaataagttttagtttgaagtctattttttcaaatactaagatggttacaccagctccttttttaggtccgtttacttgaaataccttttcccaaccctctcctttgaggtaatgtctgtttttgatgctgaggtgtgtttcttggatgcagctgaaggatggatcctgttttcacatccattctgttagtctgtgtctttttattgggggaattgagtccattgatattgagagatgtcaatgattgttgattcctgtcatttagcttttgttgttgctcttggtggtagtggggtgtacatgtgtgtgtgcatgaacacacacacacacacacacacacacacacacacacacacacacaccccttattttgattttattgctctaagatttttttattcctggttaacctccttaggttggagttttctttctagcatcttctgtagggctggatttgtagatagatattgtttaaatttggcttcatcatggaatatcttattttatccattgatggtgattgaaactattgctggctttggtgtctgggatgaacatcagtggtcttttagagtctacagcacatctgtctaggaccttctggcttttaaagtctcagttgagaagtcaggtgtgattgttaataggtcttcctttatatgttactttagtcttttacccttgaagcttttccccaaaccacaaacataaactggtcctggtattttcataaacagtgcagctaagaaacagtttagagaaaatttaataggattcagactatatctattctgtcctctgatggttttgccatctctggtgttaattgtccttttacaaagtggcgcatttggctgttgctttagaggtcctcttgtgccttcttcttcttgggtttttttttcttgaattataggggaatttgtagcttctcattgtagatagctaataaaatcatttaattcacagccaccttcatacttctttggatttagcttcttgttggctggtgagaagtagatggtaggaaaacctttgacttcatatggagaaggcacatcattgactgtggcatccgtcttggctataacaatatttgggtctctttgctgagtttctctcccagttctttatatttgggttccagattcttacagtgaccacaccaagggacataaaattcaatcagcacatccttgtcttcattattcactatgtcatcaaaattttctgctaccacaaacttgacaggcccatcgttggtctctgggataggttcagactttaggtatctcttcaggttgccatcaaagtaatcctacaggaaccgctcgagagccttgctgtcccgagagaactctttctgcatgacaaacttctctcctatggctttgtcctattagagacttcttcttcttcttctttttttttttttttttttggcccaatctatttggggttctataagcttcttgtaccgttataggcatgtcctttaggtcaggaaaattttcttctattttgttgaaaatatttttctgggtctttgagctgggattattttccttcctatactcctataattcctaggtttggtcttttcattgtgtcccaaatttcctgtatttttttacaacataatatttttattgattatttgggaattttatgtcatatacaccgatcacatacatttcccagtcctctcaggtccaccctcacccttgtgtatcccccaaaagaaggagaaggaggagaaggaggagagggagaaggggaagaagaaggagaagaaagagaggaagaaaaacaacaacaacaacaacaacaacaaaaaactgcaggcattccctgcaaacataccagccgagcaggccaggtgaagtaatggaagaccttcatcagtccctgttctcctccaaacccagtcacctagtttcatccccagctctgcctggggaccacccgctgcagccttccttctaacctccacccaccctcatctcttgtggctcccacagacctcctcctcccctccctctccccacatattgccttatcccagccccagaactccagcaggcactccctgataatccatagaccacttctgctagggaagcaggtcagctgtctgtagatattcccctctcctctagatccaatcctccggtctcatcccagtgccatggcagactctcagggtgaactctctccactgtctccccgattccaaggagatgaaataagcaatggctgattgaacagtctcccctcctctctcctatgaatcccttcagacccctagcctatcccaggtccaaagtgtcagttcccaatactaagaaatgcattttacttgaaacccccagtggccacaactatcaggtccaaagaaaatttcctatcagacagcacatatccatcacactctctgaaaattcagagaggaaacagaaaccaaggaacaaaatacccaccaaacaaagataaatccccaaatcagcacctagacttatagtcatcccaatcccaggtacctagatgccagcatcaaaacacagtcaataataggcagagaaatgtgtctccacggtcctgaatattctggcatctgaagcccagtaaaaagaccatatttatctgttttcagagagatgtgtgtgtgtgtctgtgtgcatgtgcgcacgcgcatgcacattggtgtagccatagtggtaaaaactatacatatttacctatttttagagagacttttttgtgtgtatgtgtggtgggtattggtgtagccatagtggtgagaactacaatctcatttcactttctcagtaggaactgagatgttatcagcattaagctgctaggcagagaaagccagattccgggctgactgatctccaccctccagagctgaggcaagggactcttgggatggtacatttagctaccttgatcgtggtattcagtgctacacctgtgattaagttctacaggaatacgagggattccattcataaataagcacagatagagctggaacattctaagtccgctctgcagactgcactagcatcagtttcctgcttttgactttgcacacagagctgccgttctgtgaacatttgcaggaggagagtgttcaaccagaacctgctgattttatctccttggaatcggggagaccgtggagagaggtgaccccagagggtctgctatagcactggagagaagcctggtgggtggatctggaggaacagaacaggggacgtgaagggcactcagcaactccttttatggttttttttttaaactttcctgtgtattctgcaattattttaaaacaagcagctttttatagactactttgcagatggcatcttactagattgtcctaataactcttgtgacttggatagtgtgattgttgacattttataacaaagaaaataaagatccaaggacgaggtctgctggaaaaataatacagctaaagtctctgctggccagcactaaagttagaccattagaagtgctgatgtgcctatacaattataagtgtgaaaagagttaggaaaccattttcagaagtacagatacgctttaggtcagaaatctccaaggcaaaagtaaaacccaccctctgtcctcccataacttacggtagatatgaaggttatagcgctttgtggtggtgggggtattctctacatttatgtttgcaatgtaagttccctcatcttccatcctcaggtctctaatgactaggtcatagttctgatctatgacggatattcgtccttcataagtggcctggatcacaaaaatgtcacgtggtgctccttggagtcctggttttacaaaagcaacggatgaagcaaatgaagaaacccagccaatgttcttaactttctgtggctcttgaatatttaaggggaaagtaaccgattccccaagaatcccattcaccacaagcaaatctgcatgtcttcctgctgcttcaggccctgaggatagaaatagaaaacagaagccatcagactgttgaacctctttgtgttccttctctttcttgagtatcactgaggaactgcctcacacactgctcatcctgtgttgtgaggatttcttctttcattctaggaatgtttttcttcttcttcttttctgtttattccagacagtgtgtgtgtgtgtgtgtgtgtgtgtgtgtgtgtgtgtgtgtgtgtagtcctcactgtcctggaactggttctgtagaccaggctggccttgaactcaaagagatctgtccaactctgtctccacagtgctggggttaaaggtgtacagcatgactgcctggctaactctaggtatgtttaatgtgctgtaacaacaaaatttatgttgtctgaaacaaaactgtccttgaacaaatacatgtgttcattcatgaatgaatgaatgaagaaatgaacttagccttacttgcttcaagggagtccatacaacacaagagtgaattccaatacttaactcattctgtaagtagctaaacagccattgtgtgtcaaagactctatgtaggttgggaagatagaagtgaacagaatatgatacctccaaaaccatcaaccttggaaataattttgccagaacctagaataactctttgactttatcttccaaggataaaaggaaaaatataacatgttttttgaataccacagtaaaaaacaaacaaacaaacaaacaaaaagcagtaactctcttactccaggaactcaatccatattcttccactactgggcagaaggaacagaaaagagacacacttgatatcttggacataagaaaggtttctggtctttttccttgaatgccttctagccttcagattttatgcatctaggtaaacatgttttaacacagcagatttacttaccttgtattctttaataaccagtagtatttgagattggcagggatgatacatgaagtatgcaatattagatatgacattgaactgaccagtcagaaacagtgttaatcatgaacaaccagctgggctgttttgatatgaactagttatgtgtaagcccccaagaccaagccatgttttccacataagtggattcagattaaccctaaagttgacacagggcgtggtttccagagggtctgttgagaattcaagtcactaaaatgaaaggatttcttaacctggtggtgctctcacttatggccacctgtgcccttcagctcagtagctactgcgggatcccaggactgctaggatgaacctctcccctttcgggtcagtggaaggtttgccctctggaggaatattctggtgccttagttggatgtgcaagccaagccaacacgtttcagggcactacaacaaggaagggtggaacagaaggaaaatagggacacttaccaagctacctatacacccatgctattttaggaccccagggatcataggataccactatagtcccgaaggagcccacaagatataaaaggaaacatgatgagtgccaaatgggaaagatgacaggaagaaaacttacagagaacataaagttaggctaatgctgtcagaaatccccaacatcaagtgtttccagataaattatcatactgggctgatagggttcacaaagggcacctggaatatcttagcttgtgtctcaggtatagcatgccagaggctaaacacaaaggatccggagcttgttttctggtgctgtgtgacttctaaatgcttaacgcatttcaaacagagggccccaaaattttcatttctaactgggtcctgcaaatgccatagtcaacccttgtctcagatctcctaaatatctcaaggctttttaaaatcgaggtcctatggcttaactgtcattctactctttgggtttaagttatgtatgagacgagtcagatatatgatatctaattccagctgtattccatcattatgttctgaaatgtgggggccatttgctaaggctgagagcttcttggtgttagagcagttgtgcaaccacaagtgtttgaatgtggtgtgggtgttaagctctgctccactccccacagccaagtcattcaggaaatgatgctgggctatcaaagagccagcaagaagggagggtgataggtagttgttgttgcaggggaaatactgcagctttttgcaccactgatgctgctgcaagaacccaagctcgctaagaaaaaaacaaaggagtttgaataggtgtgaaccgaattttctgctgcttttaaagacacacaactgctctgagagaggtagctgttaagactacagcacatagctgaaaaaacacatgagacaggctccagcctgggcatctacttccaaactgggcaaactcaataaagttacaaaacctttctcagtctataatagctgtaacattggcctcatctgctcagtgagcagcaaacgatgtaatgtgagcaggggagggggggctgtgttaaatatcaaagtgaaactacagtgaattattcctggtgttgatcatgaccaatgtacattttaaagattgcatggcccttccctatgactacgcagtgatgctgaggccatattggacccctacggtgtgaggacgtgttgctgtgattggtgtaataaagctaggcaggaggtatagatgggatttctggagagagagaggaagaggagggggaacctgggcaggcaagacagccctataggccagggcgcttcacctcagagcacgtatctgctctgttctccagcacaccttcaccttatgtaggtcttgtctctaacccctcccactctaaaagcattgggagctgggagaatggagcctaagaatgaggcggactaaagtctcatgcaatagttagttaactttatttagagcctcagataatttttttcttttcgttttgttggagacagggtttctctgtgtagcttccgaacctgtcctggaacttgctctgtagaccaggctggtcttgaactcacagagacctgcctgcttctgctgggattaaaggcatgcaccaccaccacctggcctcagatcatttttattctgagccttaagcaagatcatcatacaagcaaagtacacaagttcaagctatatataatcacaaggacaaactgtgtctggatggagaacaacagtaaatgcaatggggaatctgaagcaaatcctctctcatttgctacacctaggaggggcacaagagtacattccaagaacaatcctgtgctttggagactgagatcatgggactcttgttctgttttctcacaagcactaataatgctcctcacacagcttcattcgtggactatgttccaacgcctgaccaccagtgttaaaacagcccactcgtgttttctttttgtgtcagatgacattactatggtctcaaatatgtatattgatctctgtcagtcccccttcccgaaacactgcctactttaatgcggagtcttgttttcatcactaatgtttctcctataaccagtggatggtttttaagtagttcttggggttgggggtggggtggagaataagcacaaataccctttcttgctatgggtataatcactgtctctatttagcaatagaaatatgaaataaaacaaacaacaggagaggaaatccaacagaaaaactaaaaacgagggtcagagagaacttttcaccggcctttgggtcttggtcaaagtttaaactgattaataagaagggacagtcagcacattgtagcttcctttactgggatatctgctttgttttcaaagaaaatccacataaatctatagaatggggacctacaacataacaacagtgccctgaactgcagatcaagaaacataatccatgccaggctgtattgcttgttacaaccagtccattatgatccacaggaaggagagagacacttatgggtttcaaaggctttaataaatcaccccttaagtggggtcactgatcaatcagggctgccggacgaggactcgggatcctggtttctcctgacagcaccaagcaggtgcacaagcagggttcatagacacaaaaatcataaacatttgttgccaagttacagatacaattttcacaattagaagccaaagattagggactttccttgtgtgttccatcaaggtcaactgacacaaaatgggagtttctcagtccaaccaatcaaattcatttgttctttttgttgttaggaacagccataatgtattagataactaagggacataacagactatttctgttacttaaggaggaggtctgtcagccattggaaagatctcagctcccctaaggcttgggagcttgaacttcattttaccctgcaggtaaaatagagtctgaagtcaaaatgacagtacttcggccaaggtgcttttgcctgctcccttcacggctgactagctagacatctaagaatgtactgaaccagctaagtttcagaatcctgcctgggaaatgaaactaagcagagctgtcattttgagctactttgaggactagattatatgacagatccctccattttgaggagaattaagagaccctcaggaagtcttgtcttgaggaacatccttggcctgcccctttctaagtcactgttgacctgctgtttaagaacatgacttcctggatgtgactgctggtattatggaatactagccatcagtcctaggaaaagttagaaccccttcatgcctcagttccctcagttttacagtgacattagtaataacactgacctcttaaaagtgtcatgagatgctttgctgatgcccatggtaggcctgccctttctgagagactatggaggaggggtggagtgaagtggaggtggggggcaagtggaggaatgggtgtgaggagaggggggaagctgcaatggggatgtaagataaacaaattaatgaataaaaaagtgtcacgagagctaaagaagctaatatctgtgggctggcatatcctgaccactgtattgtttcttaaatacaaaataaataagaggctggagggatgagtcagtctgtcaagcaattgctttgtaagcacaaggacttaaatttagatctttagcacacatctgtaactcgggcaccatgtggggggagggtgttgggggagagataggcagatccctgaaagctcattggccagccagtgtagctgaatcagtggactccaggttcaattagagaacctgtcttaaaaaataaggtgttcatgaaggttcccacatatgtacctgcatgtacatggcacgtaattctctctctctctctctctctctctctctctctctctctctctctctccctctctcccccccaaacaaacaacctttgttgaagggattaaaataatactttatactactctgaaggaaaaagaaaaggttgggacattggaatgaggaggaaggatattttgagaggaagtagggacggttgaattattgcttaacactcactgctgccctttgtttcttcatggctctttaaataagcattgtttgttcttgtttcttggggggtggggcagtagctaaactatcctttttttattctccatcccagagttagcagtgtggctagaaactccctccatgtttgagacctgggaggatgaacagatatagtttgagtattcaacactcaaataagaatcagttatattaatcaaaataactcaagagatgttgagagctgtggtgatatattatttatgacttattaacgcttgcctgaggattcagaaggcaaagtcagcctcaagctatagagatcaggcagtggtggtacacagttttaatcccaggactcagaagacaaaggcagatggatctctctgagttcaaggccacccagggctacaagagattgaatcagtctaaaagagtaacagagctcacacctttaatcccagcactagagaggtataaaagataggaccagggtcttcagtagtgagtatcaggattctccagccatgctgaggagagcatagcagtctgggattgcagtctgaggtttgctggagacaggatggcctcccattctgatgtagaggtaagagccacctcttaacaacaaaaagaacaaagcaggggttggctgctttgcttttctgatcttcagcttgaagcttgaaccccaataccagtctctgggtcttttatttatcatgctacagagagcaacgaggaaggaaagggctgggcaacagaaatcctatgtcactctccataattatagaaattctgagtcacaattttgtttgttagtttaaaggaagcctacaaccctttataacagtataccatttcccagatatttttactttatataatctttttttttttttaagatttaggttactctgaatcaatactttaaaaattgaaatcaaacacaaaatctcaaacagaggcagggacatgaccatctgttgctttactagtgtttttcctattagcatacatttaaactttgaataaaacaaaattcctcactttttgacttctgagtgcctatgtagcaatgctttcatttgaaaatgggtttatcagtactatccaacttatagagtatcatgggattgaacaaagtaataattgtagaggacttagaattgtgtcagacatatagtgattgcttcatacatggttaagttttgttattattgatgggagacaggacaaaatcaaaatggaagggttgaacaaatagatgcaaaaaatgagaggaagaaggaaaactaacacagaagagacttgtagaaagaatgaacaaaaagcaagtagtggactcttctatcttttgtctctggaggctaagtgactccatgacacatggaagacaatcagtcacaaattgtgagaaaaaatgaatcagaacatcagactgtaagtcttggttttgagaaaaaaattccagcacagagaagtcatgagtttactgcctccaactttcttgtagcagtgatttcagggaaaaacggagatgtttttctttactccttgcctgtttcactgctctgattgctggggaagggggcagaaaagcagtgttggtctccatgcccagcactgagtagaagggactactctaccatggatagtagcaggaagaatctagagcatatttttcccttagcaagtacccgtgaaataaaccttaagaggggaaatgtaggtatacttggggtgatccatatttctgacttctttgaaaacaaggccccaatccctgttttgaggatgccagacaaaatgaatatctgatccttggtttcatttttagaaccccagtagcccgcactcaagctcagactgctaccatattttttctgtttagcttccgaggaccattccacaaatggctaagtcatgcccaggatctctttacaacagaaccgggacccttcttaataaagcatgaaacacaagtgtgaaacacagcaacagaattagctaacatatacatgtttttgagacagggtctcactatgtatagagggctggcctggaactcactatgcagaccagaatggtctggaattcccctgcctctgtcttacaaatgctgggattaaaggtatacaccaccaggcttggctaattttttcaaacaccacacacacacacacacacacacatacacacacacacacacaccatcattaccaccaccaccattactatcactaacaaaacaacaagaatcaataattatttgtcattggcatctctcaatattagtgatctcaattccctaattaaaaagacacagactaacagaatggatgtgaaaacaggatccatccttctgctgcatccaagaaacacacattagcatcaaggatgggcattacttcagggtaaaaggttggaaaaagatattccaagcagatggacctaagaaataagctggtatagccatttttgtatctgaaaaaaatagacttcaaactaaaactaatcaaaagagatagggaatgacactacacactcatcaaaggaaagatccaccaagaggacattgcaattcttaacatatgtgcccaaacacaagggtacccagggtagtacaagaaacaccactatagcttaaatcatagactgactctcacacactgatattgggagacctcactacctaactctcaccaatagacaggtcatccagacaaaaactcatcagagaaatgctggagctaacagactttataaaccaaatggagctaacaaatatttacagaaaatttcacccaaaagaatatgtctacttctctgcacctcatggagctttctccaaactgcccacatacttagatacaaagcaagtgcaaatagatacaaggaaattgaaataattctccaaatcctatcagattatcacatgttaaacctggacatcaaaagaaaacaaaacaaaaaccagaagtaacagaaagcttaaaaactcatggaaactgaacaactctctactgaacgaaaaatagaccaagatagaccaagacagaaatgaagactttctagctttcaacaaaaatgaatatatcacatactcaaacttaagaaacacaatgaaagtggctgtaagaggcctacattaaaaaacaaaacaaaacaaaacaaaaaaaaccacctggcaagatctcatactagaaacttaacaacacacctgaaagtgctagaacaaaaagacataatcacaaccaaaggagtagacagcaagacataatcaaactcaggacagaaatcgataaaatagaaacaaagggagcaatacaaaaaaatcaatgaaacaaagagttgattctttgagaaaatcaacaagatagataagcacttattcaaacaaaatcagaaatgaaaagggcaagcataacaatagacacctaggaaatccagagagtcaaaagtatattcttaaaaaacctgtacttcactaaattggaaagtagaatagaaatggataattttctcaataggtaccacttaccaaagttaagtcaagatcagataagcaatttaaacagatctataaccctcaatgaaatagaagtagtcattaaaactctcccaatcaaaaaaagcttagggctagaaatatgccagactttcaaagaagagttaataccaacactcctcaaattgtttcacaaaacagaaacagaaagaacattgccaaattcatgctatgaggccacagttaccctgagacccaaaccacacaaagacccccccaaaagaaagaaaattacagaccaattccccttatgaacatagatacaaaaatacccaattaaatacttgcaaactgaaccccagaacacacaaaaaagatcatcaaccatgatcaagtaggcttcatcccagaaacgctgggatggttcaatatacaaaaaccaataaaggtaatccaccataaacaaactgaaaaaaaaaaaaccacacacatatgaccatctcattagatgcagaataagtctttggcaaaatcccacaccttcatgataagagtcctggagagagtagagatgaaagggacatacctaaacataataaaagcagtttacagcaagcccataggcaacaccaaattaaatggagagaatctcaaagcatttcaactaaagtcaggaacgagacaagcttgtccactttctccatacctgagcaataagacaactgaaagaagtcaaggatatataatttggaaaggaagaagtcaaagtatctttatttgcaaataatatgataatatacataagtgacactaaaaattccaccaggaactcctacagctgataaacagtttcaacaaagtagctagacacagaattaactcacaaaattcagtagctctcctatagaaatcatggaaaaacctttcactatagcctcaaataacataaaatatcttattgggttaattctaacaaagcaagtgaaagacttgtatgataaaaacataagatattgaagaaagaaatagatgaagctatcagaagatggaaagatctcccatgctcatggatcatgataggatttagtaaaatggccatcctacaaaaagcaatctatagattcaatgcaatcgtcatcaaaattccaacacaattctttacagatcttgaaagtacaattgttaactccatataggaaaaacaaaacaaaacaaaagccagtataattaagctgggtgttggaggtacacaccctttaatcccagcactcgggaggcagaggcaggcgcaggcggatctctgtgagttcgagaccagcctggtctacaagatctagttccacgacagcctccaaagccacagagaaaccttgccttgaaaaacaaaaacaatcaaacaaaaaaaagtataattaaaacaatcctggaaaataaaagtactttggggaggcctcaccattcccaatctcaagtaatattacaaagctatagtaataaaacagcacggtgttggcataaaaaaggaaggtcaatcaacagaattgaaatgaagatccagacataaatctacagacccatggacacatgatttttgataaagaagccaaaattatacaatggaaaaaagatagcatcttcaacaagtggtgctggtctaactggatgtttccatgcagaagaatgcatacagatctgtacttaacaccttgcacaaaactcaagtccaagtggatcaaagacctcaacataaaaatcagatacactgaactgacagaagagaaagtgggggatagccttgtactcattggcacaggagaagagttcttggatggaacatggatgacgtaggcactaagatcaacattcaataaacaggacttcatgaaactgaaaagtttctgtaaggctaaggacattgtcattcaaacaaagcagcagcctatagaatggggaaacatttttagcaactcacatctgatagagaactaatatctaaaatatatgaagaactcaagaaactagatattaaaaaaaccaaataatccagtttttaaaaacatggggtacagagaattttcagttagaggaaactcaaatgggtgagaaacacttaaagaattgttcaacatcctcagccatcaggaaaaagcagatcaaaactactttgagattccaccttacacctgtcagaatggctaagatcaataacacaagtgacaactcatgctggagaggatatggaataaggggaacagtcatccattgctggtgtgagtgcaaacttgtacagccattatggaaatcaaactggcagtttctcagaaagttgggaatctatctacctcacgattcatttatactactcttggtcatatacccaaaagatacttcatactattacaaggacacttgctcaactgtgttcattgctgttctattcataatagccaaaacctgaaaccatccagatgttccttaacagaataatgaataaagaaattgtggtacatttttcacaatggagtatttctcagcttttaaaaaaatgatatcatgaaattggtagacaaatggatggaactagaaaaaatcactctgagtaaggtaacccagacccagaaagataaaaatggtatacattcacttatatgaggacattagccattaaataaatgattaccaacctacaatctatagacccagagaggttatatatagagggtgataaaagagggggacatacaaatctctctaggagggaaaaatagaatagattttatgggtggactgggggaaggttgggacagaaactggaggggaggagcagttgggaagcaggagaggagacagggtcaagggagggaatgtgggagagacagctggaattgagggacatttgaaggatgacatggaaacagtgcagtagaaactttctaacatatatgaaggcgctcctaatgaggtctcctaataactggggagatggagtcctgactggccatgtcttgtcactaaataaggcttccagtaccaggactaggtttcatttagtttagttgttggacaaggatgtctcatgaaaatcccaaaatgactcaggctgtggctaagacaaggggttgctctccacaacttgacggtggggccccattctggaggataacactaatacaacccattgaacatggggaggtctacctggtgcctacatggagtctttatccctatattctagtgtctctggcacgggaaggtactctgaaggctatcaaaagagaaaataaacactaacacagccacaaaacctttgacctatagtctgtcctgcatgaaagatatgctagggcaatagtggcacaaaacctgtgggagaaaccaaccaatttctgagttgccttaaagaaccctccatgagatgaacccaaactggacgctgcctgtgtgacccagagactagatagcccagagacctagggtaaaaccaaatacgacttgtctttaaaaaagtaacaataagatgactcctattgatatcttgctatactcatagatcagtgccttttccagccatcattacagaagctttctcctgcagttgatgggaacggacgcagagacccagagccagactgtgcggagggagagtccttggagtacacacagctctagatgggatgtctccatcaaatcccttccctcagagctcaggaacctcacagaataggaggcagaaagagtttaagagccaggggtaatggaggccaccaggagaacaaggctctctgagtcaactaagcaaggctcatatgaactcacagagactgaggcagcaagcacagggcctatacggtctgtaccggttctctgtgtatatgttatagctttcagcttagtctttttataggactcctgtgtgtgtgaatgagtgggtctgattcttgtgtctgctgttgggctcttttccttctgttgggttacattgtccagccgcagggttatggcttttgtttcatcctaccatattttattttgtcttggttgtttgttatctttagaagcctgttcttttctaatgtgagtcagaaatggagtggttctggaggggaggggaggtggagagggcctgggaggagcttagagaagggaaactgtaaccaggacatattatataagcaaaaaaaaatctattttcaataaatggggaaaaaagaaaataaaaagaagcattgtttcttatcctgcttgctagtgttttctattatatgactagtaattctattctattactattccagtgcctagcattaattaactaattaactacccagcaaaacatttttaagtgcctattatgtcccaagcatattatagagacaagacaagctaagctgagaggactaaataaagagatggaaatacaaaagaaaagtcaaactgaaatggtgctggaaatgaaatacttaagtcaaataagtagttcagtggaaagtctcaccaacaaaacagatcatggggaggaggagagagtaacaggaattggaggcatagttagggattgaactatcaagaggaaggtgattggtttattgctttaatgaaataaagcacatagttttgatcttaaattctttctgtagttcagtgttttgagtataatataaacagaagcccacggtggtctgctgaaaatagatcaaagggacatgtcaatgccttctcaagcatagtttctaaaattttatggaaaagtaggaattgaattctaacaaggttcggaacttacaggtttgcaggcaaaggaaccagatccacatgtggtggtgagccatctccggtcaggctggagtcttctgggggagcagactctgttttacacttctgacgtttcaggaagcctgagagaggaagttagtgctgactaaaaaagaagtatttgtttttacactacttaactagtgtttcccactatataactacagaacctattcattgttaattaattattctgcaaacatttattaagtgcctactataagccagacatattatgggcattgataatatcaacagaaataatgtaattgactgccttcattttgtggggtttgtaacattttttgagggactgataattacacaggaaatttcaataaatggtgatatctgttgcaacaggaaaaaaacaaggacaatggctgggctgattcccgacaagttgttggtcagggaggtcagggaggtccctgaggatctccaaaaatacaggcaatttctaccacttttggttgcacactacagctagatggtaagatgccattgctgaagattccacatgctctagtcacaggacagagggaaatcaggctggaattagggtggaaccctcctcttctttggatagtcctcataatgccagaaggtgctgatgggtacaaattgtcttcaacagtcttactcagctggggaccctgcatgcacactagtgaccagccaggcaaaaatgtgaccactggtgccatggaggtaagtcggtcatggatataactcccactttaagattggatttgaggtccactcccaaggagaaaacctgcatttaatactataaacttggccaaaggcctttggctgaaggggtcatagggcttggcagagaagctattgctactgtttagtaaatggataacatgcgtcccttgaattaccttctaaacgactatgtttatgcccataggattgtgatactctctactttaataagaagagcttctttttgcagtgggggtgcagccttcagcccttcaatgtgtcaatgtcaaatactgattgaatagttgagaagtgactgttgaacactcagccataattgaggcatctatatcacttcctctaaggcccagggaatattgctggaggaaggggtcggaaggttgtatgagccagaggaaggtcggtttgttatgggatgctgacatccaggttggacgtgcattctacacttttaaactccaagtctggacatgatatataccaatatccagtcatggaatatggatgaaatcagaaggcccactttccctggaaatatacacagtaaatagcttacagggaaggaagagatatatttttcagtgatatggtcacttattgtaatttcttttattgtcttattaaaaaataaaattcaggagtaaatattagggaacaagtctaagagatccacagggcgatggagacacaatcacctgccctttactctacttctcagatcaaaaatcccgagcaaaccctctggtccttttcttcctccttctatcactgtctgaacctgccaggaaactctatggtccactctggccaagtgatatggactctaccctttgaatagagattgaactctattggtggtctcagagcaatcaacacaaacaaatttcccccaacaatcagtagtaagacattcttactcatactcgaataaacaaccataatgaaactcactgggaggaaaaaaaaagacatcaaagtctaaggagaatttactaagaagaggaagggatcagtggggatgaggggatgagagggtaatggagaagtgattgtgataaaaatgtatcatatatatatatatatatatatatatatatatatatgaaaatgtcataatgaaatatttaaaaactgaccatttcctcaaattttggaacaagacaaggtgtccattttctccattcccattttacacagtgcttgaaactttagctagagccacaagacaagaaaaagatataattggcatggtagcacacacctttaatcttatcactggagagaggaagaggcagagggaactctctgttctaggctagcctggtctacatagtgagttccaggacagtcaaggatacatagtgataccctggagaaacaaagacacacacacacacacacacacacacacacacacacacacagaaagagagagagagagagagagagagagagagagagagagagagagagagaatattagaaaggaagagattttaaactatttctatttgcaagtaacgtgattctatacttaaaagatcctacagacaaaccaccagaaaatgtttggatcttgaacattcagtaaagtagcaggataaaaatcagtatacaaaaaatcagtatcttatatatatggcaataacaaacttgctaagaaagaaattaggaagagtataccattaacaatagcttataaaatacatccagaaataaacttaaccacagaaatgaaagacctctacaaggaaaatttgaagatactgggaaaagaaattggagaagacaatggattataggaagacctgccacgctcatgggctagcagaattaatagttgtgctgatagtcatattgtcaagaataatccataaattcacacaggatctcaacaatattttttcacataatttggtaaaacagtggaataaaacttggaacataaaagatcagccagtgtaattctaaacagaaacaatacagcctgagacatcacattgcctttcctccaacaactacagtgtaacagtgatagagacactatggtcctggcacaaaaacggacatgaaaaccagtggaatgtgataaaggacgaagagataaatccacacagctgtggtctcttaatctttgttgaaaatgtcaaaacatccagcttttgttctcaaaaaatttcactcacacaaccaatagcagtgtgtgctgtctagttttatgtcaacttgacacaagctagagttatctgaaaggagggaacctcagttgggaaaatgcctccataagacacagctataagacattttcttaattaaggatggatggggagagcccagtcctttgtgggtgggaccacccctgggctgggggtcccaagctttgtaagaaagcaggctgagcaagtcatgatgagcaagctagagcacacaactccatggcctctgcatcagctcctgcctccaggttcctgccctgtttgagttactgtcttgatttccttcaatgtggaaatgtaagccaaatagcccctttcctccccaatttacctttggctatggtatttcatcacagcaacaaaaaccctaactagaacacagttatcattttataggcctctaaggtatccctggccaataactcccagaggtaacccaccactggttctgagactttcatttaacaaccttatagcttttgggagcccctttcccaacccatgtaggatacctttaaaataattgaggcaaaacaactgttgtttttaccaatttttttttaagatttcactaattttgttagacactcagaagttagtattaaaaacaaaacaacaaaaatcccaaacacatgtaataatacctcttaacaaacagtgaacaggttcttcaaaactccacagtagttcatctgaagcatcagatgatacgagttagcagctaaggcaaaatgatagcaagctccaatacaggatgaagatttatgcctcactcagttgtctggtttccttatcctggcccactgctatggggcttccatgctcttcctcacctccatggacttagtgggccagctcaagcagtttaggtcagggccaaggaggaacagttgggtttgcctgccacagctatgtctggctgggtctgatagactctgggtctgaactgtagctgcagctactcctattatctccccatcagccacatctgacttctgggaaagttctaggctaggccaacaatttctatccccagcattttttttttttttttggtaggaggaagatgtacacagtttaatttactcaggggaatgactgccctccctcaggacaagcttagtccttttcttttgtattgttttgacactctcaccttctattaatacaactttttttcatcacttttctttctgtaggaacacaaatcttgctcatctgtcttcaggtgacatggaaagacccctcccctctccttatttgttctagattagcacttcataaacctagtttacatgccagtctaagtcatttacatctaccaaatcctctcctagcccataaaatccatgttccaaatggggttcatcaaggctctgggaaccccttttctgaattctctggtgaacaacatcctattctgggcatcatgcaccacctcccgtatggctagcttctttctcatcacttacctctgcttaccctctccaccgtctgactcttcccgtaagttcccgggatcccagagtgagttctttattacagatgtgacaacgttgttctctttccttttagtgggcgtggagttacttacaggcacatggatgactgactcaatgacagctgaatcaaagaggaaccatcccaatggaagggatgatgttaaagccgcatccctggagctccctacatggcttgcatgtagttccacaggccagagtctgccccctcaggagtggtttactgtttctacgagccaggggtggatggagtggggtgggtcttgtggatcttgatgaaggttaagagtgtcctgagacttgtgagctggttactccgggagtctcatgagcttcacttatcctctcaaggcaggcatgttagactcaggaaattactgcacagcacatgtcctgtacactgttcagtttctaatggactaaagaccccaaattaaatccagaaatgttgaaactgctgtgggaaaatgctctggaatataggtacaggaataaaatctgaatagatcctcaaaagcacagaaactagccccaagaattaaatgggatcacatcaaatcaaagagcttttgcacagcaacagaaatgtcaatggtgtgaatagcctagagattgggagaagatctgctgtctacactccaggtgaaggctagatacctagaatgtctaaaaatacttcagaaatcaaacaataaaaccagcaccttgcctctcaataaatgtgcaaatgaactcaacacacagttctcaaaagtaatataaatggccaataaatgttttgaggagtgttcaatatccttagccattagagaaatgcaaattataactactttgaggatccatctcactttggccagaaggccggcatcaaggaaaccaatgataaaaattgctggtgagcgtgtgcaaaaagaggaacgcttattgactgctggtgggagtgtaagaggtgcaaccactgtggaaatttggttgagcatttctcaaaaatcaacaaataggactgtgcacacccctcaagaactgggtgttctactgtagaggtacttacacatccatgtttgctgatgctctatttacagtagcagggggatggagtcagcctagatgtccatcaactgatgaatggctaatgaaaatgtagtgtatggacacaatggaattgaaagacccccgcccattagctttttcttttaagtttgcctcctcctccagtcggcggctggcgggcgcgcggcggatgcatcctcccctgcactccccgacccccgatccccacacccgccggcttctccttccccgccaccgcgcaaggccggcccccgccgggcccagaactcgagccggaaccagccaacagcccatgagcgcagaacggcttaggacacttccgtacgcgcacgcccggctgtcggctccccccccagcgggttcactccggcggggctcgtgccccgaggagcccgaggcggcgagagggcgcccttccccccccaggccctgcttgatggagatcgctccgacccaaggtcagccatctggacgtggaaaaagataagtaaagccaaggccgtttcgcctgactactagaccttgagaaagtgctgatttgaaataactttacacctcattaaattgtccaatagaatccctataactgtgcttttcgcttctgtactgcgcttttgctatataaggacccctcttcctgggcttggggcttggcctaagagaagctaagtccccgggtacccgcgcattaataaagcctcttgcggttttgcatccaagtgtggtctcgctgattcctgggtgcgggtctccttctaagaaagtaccccttctggggtctttcagaatttattcaaaggtaaaaaaaaaatgcgaggaaatagacggaactggagaatagtattatatgaggtaacaggcacagaaagacaaacatagcatgctctttcttactctaacttgtaacggttaaatctatgtatttaagtgggagggtaagagaaggcaaggggctagtgcctgtgagatgagaaggaaaaaactaagggctgggctgtggaggacagcagaacacacagatgcaaaaggggaacctgtcggagggagagggggtgaccatggattgtggggagagtaggggtgatgactgcatctcactgaatgtgagcatttttcatgtcaccatttccttaatacagtgtttacataacatttccattgtattagattttataaacaaaaattaaaaaaaattcaatataagtttttggtagattcctgctaggaattcctgtgcccacaaaagagcaggcactgagcagtcataaagacacacttcctaattattgggtatacaggttcattctagaactacaggaaataatttcacatgagaaacagctgaaggaaaaggggctgacatcagttctacctgaagatcccctactcacaactctagtcatctcacgacagatggcggagttcaaactaagaagagagtggcctctgtctcgaatgctattgtgggaatttctcattgtgtgcttgaatcttggatatttcaaaatagaaattaaaaaaaaaattctgctactttcttcgtgaactcctcccaagcatccaatgacctttgggactatttatctaagagatgccgtttttctagtataaaaacagctgcagcatgtggtaacatgataaatacaagttttgtgtgtgggggggggtgggggatgggcactgcaacagttttgatgtcagcttgcaagctgagctgaaggaactactcactgggctacagagagagaacctgccttaaagaagaacaacaaaaacattgaaaaattaatatggtattctctacctttacatctcctccctccttttgagacaggaccttgttatacagcccaggctggtccagaatttgtaatctttctgcctctgcctccccagtgctaggttcacaggtgtatcactgtacctggctccctacttgactttctgctttcattcttcttcaatagggacccggagtcttcatctccatgttgtgaactatctgttggtcagttctccattgtggttgtttgaataagaacggcccccatagcctctatatttgaatgcttagacaccagggaatggagctctttaataggattagaaggtgtggccctgttggaggaagtgtgtcacttgggggtggtggttgaggttttaaaaacccatgcctctgccccttcctcctctcagcttgtggatcaggatgtagctctcaaatatctctctcacaccatgccagctgtcttagttaggtttctattcctgtgaagagacaccatgaccacagtaattctttttttttttttttctcgagacagggtctctctgtggctttggaggctatcctgaaactagctagccttgtagctggtctcaaactcacagagatccacctgtctctgcctcccgagtgctgggattaattaaaaggtgtgcaccaccaccgactggcgactacagtaattcatataaaggaaaacatttaattaggggtgggcttgcagtttcagagggttagtccattattgtcatggcaagaagcatggcagcagggaggcaggcatggtgctggagaagcaactgagagctctacatcttgatccataggcagcagaaggagactgtgtgccacactgggtgtagcttgagcataggagaccccaaagtctgccccccccccagtgacacactggctccaaaaggccacatctactccaacaaggccacatctcctaattgtgccacttcctatgggccaagtattcaaacacaggagtctaggggggtatttctactctaactaccacacctaccaagcctgccaccatgttttctgccatgatgataataatggactaaactgtgggggaccaaatatctctgttatggaatattttgggtcccaggttctggccaccataaacagtggtggctccaggaaactccggcccactgttgtattgttaatgtcagcaggggtacttttgtttaccatggcctaagggtaatatgcatcttatttgcatctgtatgtgcctaagcatctgtagtgtataggcctgcacctgggcagggagatgaggacagaaggttaggagccaagcgggcgagtggcgagaggagagaggagaacaaagagagaaatggttgcctcgtagtattagcaggatggttaagagacaccagaaaagatggctaataaagaaatggctctggttccacaacatggaactgagagttctctgaagatgacaagatgcctgtgtttggtctttattgctgttgggttgcttgaagcttccaggtccacaccccccgaaacaggtagaacctcatggactgaggctgagacattctgggtcatgacactaaacctctgaaactataagcacaaagaccctaattaaatgctttctaagagttgtgttggtcatggtgtctgttcacagcaataggacagagattaagacattcatttaggaaaaaaaaacccacaagcatatgtttgtagttaaaggggacactaaattcatagatattatttgatgctctgaaatgatggtatatccagaaaaaaaaacaggtttgttataatagcaaactgataaaatagtttaaaaaatgatttctaggagctagagagatggttcagcagttaagagtatgtattattcttgcagaggacctgatttgagtgcaaaagccaagtcagatggctcacaatcacctgcagctccagatccatggtatctgacaccctcttcaggcctcagcagacaatatctttttgtgcacaaactcacacatagaactgtacatatgcacataattataaataaatctttaaaaattctttcaaaaatcaaactgaagacatctttgtgatgtgatgtgatctctctctctctctctctctctctctctctctctctgtgtgtgtgtgtgtgtgtgtgtgtgtgtgtgtgtgtgcacatgttggtgtatttgaaagtgtaggtgtgggtgtgtacatacacaacaggcatgtggaggtcagaggacaactttgagagcctctaactgacctgaacctttactgtgtcacccaggttaactggaccatgaacttccagtgactatctgtctctgcttccagtctcaccactgatgcctctcccagctttccatgtggtttctagggatccacacttaggttctcatatttgcaaggcatgtggtttcctgagctctctgccaagctcaacacctgctttaactgagaaaataagataaaaattctacttattactgtttatattatgctatatttagacaactggctatctggacaccaaaaataataatttctggtacatggtcacaaagtttcattagtgttctacttttatcatctctagtacctggttattgcaatttattctacgtcatatataatttcgtcttattttagttaattctcttgtaaatgaattgcctgtatgttcacattttatggcatttaaaatcattggaataattaaatgattcctcttgatatttttctctgagacagtaatctttctataattattgaggcactatgaagctctgaaaacaaaaccaaaccaacccccaaaccccaaacaacaactacaaaaagtctactgaatggaagatgctttttttctgtcttattctgatttctccgaaagcttttttgtttgttttcatttttttaatagtgagctctcataaaccgagtgacttgtatttgtcacagttttcaaggacagaaaaattgaagatcaagtttctggctggttcaaggtctgatgtgagcctccttcctcttaaaatgttcctgtcaccgtggaagaatcattgcagaagagacaaggcagctcttctgcacacacacacacacacacacacacacacacacacacacacacactttattttgtatataggtgtttcgtctaaatatgtgtctatgctccgtgtttcagtttgatgtcaatggaggtcaaaaaatggtgtcagaaccaatgaaaatagagttacagatggttgtttgctggaaatggaacctggtgttctggaagagcaacatccagttgaccacttaaccatctctccagtccctccaggctgtctattgaaagggcataaatctcgacctcaccatccaccctgctgccaggccccttcctccaaacctggcagatgcctgtgcaggccatacctatcagaagaataggagaacgactcacctgctagctgaacagccccactccctagatccagctcccaaagacccatccctttgcccctcttccttccccaccactatctccttcattgttgtacccctaccacaacccaagcctctaaaagccagaagggcctggacagatgtcttgcagactaagagacatggacgccagctcagactactactcagcaaaactttcaatcaccatagacagagaaaacaagataatttatgacaaaaatcaaatttaaccaatatccatccacaaatccagttatacacaaggtactagaaggaaaactccaaccaaagaaggttaactatacccatgaaaatacagataataatctcaaagcagaaaaacccaaacaaggggaacacacacacacacacacacacacacacacacacacacacacacacacacacacctgacagaaggatgatcatcaaaatatacaatgaactcaagaagctagccaccaaaacaccaaacaatgcaattaaaaagtggagtgcagaactaaatagagaattctcaacagagaaatctaaaatggctgaaacccttgagaaagtgctcaacatccttagccatcagggaaatgcagctcaaaaccactctgagataccatcttactcctgtcagaacagtgaaaatcagtaacatcaatgatagtctatgttggagaggatgtggagaaaaatgaacactcctcctttgctggtgagtggtatacatggtatatactcactcatatatgatttttagacatagagcaaaggattgccagtctacaatccacaatgccagaggagctaggaaacaagaaggaccccaagagaagattgcatagttcctcaaagaaggggagggggacaagaatccctgaacaaagtgggagcatggcagggtggagaaagaggaggtgggaagggaagaaggggaggggggaggagaacaagaggactgagacaggggaggtatagaggaggaaaagaaaggagatgccttgatagagggagacagtacaggtctggagagaggtctggcacagggaaaatgttaggggatccacagggatgacctcaactaaaaatccaagcagtggtgaagaaaatgctattgatgcccttcccctataatgagattgatgtctaacttggttatcattcttagagccttcatctagtagctgttcaaagcagaaaaggcacccacagctaaacactgaaccatactactggaatccagttgtggagacggaggagggatgagcaaaggaaccaagatggtgctgcagaaacagttgacctgactagtgagagcatggagaccttagtcataaatcttaggaaacagcattggactgaaccaagccctctgaatgtgggtgccagctaggaggccagggcagtctatgggacctctaacagtggagccagtctttatctgagagcacaaatagacttggggagcccattccctatggagggagcccaggtacagcaagaaggcctaggcccttccccaaatgatatgacagactttgaaggtccctggtggaggacctcactatccctggggaggagttgggggatgggttgggggtgttggtggggaacctgggaggatgggatggcaagggaatggggggatagatatgtaaatatgaatagtaattaaagaatttaaattaaaaagagacctcagcataaaatgagatacactgaccctgatagaagagaaagtggggaatagctttgaatgcattggtacaggagacaactttctgatcagaataccaataacacaagtaccaagtttgacaagtaataaatgggacctcatgaaactgaaatcttctgtaaggcaaaggacaccatcaataggctataccactccttagcgtatgcttgtaggggtctgacctaggttctctgcatatatgttatggttgagtagcttggtgctcttgtggaattcctaacagtgggactgggtgtgtctctgattctttttcctctaattgggttgtgttgtccagccttgatgtgatggtacgtgtctggtcttattgtagcttgttatgccattgttgttgtctctgggaggtctgttcttttgtgaaggaaggcaaggagggtgaatctggggagaggggaggtgagggagggagactgaggggaggggagaggggaaactacagtcaggatgtaatatgtgacagaagaataaaaagaaagggcacaaatcttgattgagaacagtaattttcttccctctcaggacatagctgctttccaaaggccttacacaataacatcatcttggaggtcatgagttcaacacatcaattttaaggaagtaccagtattcagatcataactttctgaactctaaaaatctatatatgaacatgtgaaccatattttcagattctatatgtattaagtcttccactcaaaatacatttcttatgcaggtattcttatgataaaacatttatcaaataagttgtacttaattattgtttttttggtaatcttggcaaacaaatatgaaaaaaattttaattgaatttctatggaatataaggatttgacttgtaaattcttcacagatatcaaaagatacagcacagcttaagtctttaacttttgagaggaatgactacacttgatgggagatcagtgtctcatgttcctcataggggtgaagatgaatttggagctgtgtttttaagccactagagagctatggaaacaacagcacaccatgatctgtatgtaattccatgaactgacaaccaccagctgtttccccactttgttggggatgaagaggaaagactgagtttatgcataggctgaacatttaacttcttttggtcaggaaagggacaggcggaaaataatggaatctctcgagtgcagaaagttgtgaatatgaaatggcgtctagtgtgcgctaatttttttctcaatagaacaggaatgcgtggaggctagggagctagactgataagaactggcaagaggccaaattaaaacaaatttagttttaaaggctttaattggctttatttgtggttctcgatccaggcagccttttattcagaaaatagagttactgtttcagtgagttgggcagaagtggctacttttatgaatacagcatctccaaggaaagcacaaaccaagaacaaggaatagatttgttcctcagctttcacccaaagttgtattccctaaaagttaggaccagaaggcagagcgtcagcaaggtaactggtgaggactgggttactgtatattattattttttccttcttgctaagtactaaagaaaacataattttattaccatggcaactgaacctagctcttcagggctagggacacagctcggtggcccagattgcctagcatatgtgaaattgatccctagtatcaccaaactggacagatcagaacacaaaacaaaagctgcctatttggaaaatgttgctgttccttctgtctgtctctctttcctgatttctcaaaccaagtaataagttagttagggagtttggcgtgagtgactccatttctaatttgtagtttcgtctgtcaagggcagagcggggaggttgggaacttaatcccaaataatggggtcctattgtgaaatcactgctcagtcctgtagttctgggagagccttccatggctacctctcccttaactaattttcagattgtgtggaattccagactgaagcggtgggctgggtaaattgacaggtctctcagatcttaggacaacagatgtttaccagtattttagttaaaggctcaggaggaccacacccaaggaaccgggtaaaataaagattttatttttattaagtcttacttaaattgaaactcaacctgactaagctgaattcctaattacaatgaagtgatcagcctcttacaagatctgcctgatagaaaaaggaagtgggttgtctgatagaacaaaatatagctggaagctttggcttcatctctctgtctctctgtctctctgtctctctctctctctctctctctctctctctctatatatatatatatatataatatatatatatataaaatatatatatacatatatatatatatattatatataatgcattaagttttaaaatgccgtgcagacaaaagtgattgatcagagtgactatttagtgcctggtcctaaaggaagcatcagtatcacttcctccaaggatcaggaaacatcacggaagaaggggtggaatgaacatagaaactggaaggagtaagggaaaaggctggcagggcagctgcatgttataactcacagcaactgtgattacctgcacgacatttattttacttttagctgatcaagcatgtgatacagaacactggttttcattctcgttgtctctgaaccccggtggcagagagggcgatggtgaatgctctcaatttgcattctgttttccacttcagaactgttagcatgctgtcccagaagcaggaagcattcttggggctccagctttccccaaagacttaaacgcagataatgactgagggtggagggagagacaatttctttagtggtggagctactggcacggtgcacacactgctagaaacaaattcccatccatgctcctgtacaccttaattaaactcctaggatcacacacacacacacacacacacacacagaaatgaaagtagaagtggggcccagctgggaagaggaagtgagacacgaaagagtaactaggattggacatgatcaaaacacactaggtacatatacaagatgtcataatggaaccattagatggataattaatatttgctaataaaacattttcaatgttattaataacttagaggagaaagagaaagcaagggcttgggatgtatgtgggtggcacagcacatgtctagcacacacaagaccctggaatcaattcacagccctcatcctcagtgagagagagggagtcagatgatgatgatgtaaaagaataccttaatgatcttgtcatgaggggaaaatatgaaaagatagaaaagcataaatgacaatgtaaaaatggatatctaaatcaaatttgccttctgcttaatgaatgacagcacaatgttgaaagaggtgtcacagtcgactaatactatcacaaaaggagagtgagagcctgtgtgtgctcaagaatagaaaaggttatctgggggagaatcagttaacagtatgtataaataattcatagaagtagaaaatagaatgcaaataagcattgggagcattcactatatcctcctctgccaccagggatcagagaaatgaaaatgaaaacaagggttctgcatcacatacttgatcagctaaaaataaaacaacccccccaaccccccagataccatagtacccagagctggtgaggaggtgggaaaagaggggtcctaatgtactgagaatgggagtatgcattttgcataagaactactaattcactacagtagtgaatttgcataattaattctccatagagcaattctacattggtgaccactcagaacacttctgtagatacaaagacatggaaagttgatagatattcacaataaccaggagttaaagaaacttgaatattaacaaggaaatacaccacaaaatatgacatagccataggggtatatatatatatatatatatatataatatatatatatatatagttagtaacaaggttgcttcacatgttaatcccagctcctgctccctcccctcctcccctgctccccaccaacccctccaagtcctcaccccatcccccctctgctccccagggagggtgaggtcctccatgggggatctctaaagtctgtcatatcatcccagacaggacctaggccctcccccatgtgtccagactgagagagcatccctccatgtagaatgggctcccaaagtccattcatgtgtcagggataaatacttgtctactacccgaggccccatagattgccaaggcctcctcactgacacccacattcaggggctctggataagtcccatgctggcatctcagccatccgtctggggtccctgagctcccccttgttcaggtcatctgtttctgtgggtttcaccagcctggtcttgactcctttgctcatcactcctccctctctgcaactgggttccaggagctcagttaagtgtttagctgtgggtgtctgcctctgtttccattagccactgggtgaaggctctaggatggcatataaggtaatcatcaatctcattatcgagtaagggcattcgaggtagcctctccactattgcttagattgccagttggtttcatccttgtagatctctggaaatctccctggtgccatgtttctctttaaacctataatgtctccctctattatgatatcttttatcttgctctcctctattcttcccctgactcaaccttcctgctcccccatgtcctcctctcccctccttttctccccctctctttttcctagctccctctccccttcccccatgctcccaatttggtcaggatatcctgtccccttccccttctctggggtaccatgcatgtctctcttaaggtcctccctgtttcccagactctctggcaaccccctggtccatgtctaaaatccatatatgagtgagtacataccatgtttgtctttttgtgactggattacctcactcaggatggtttcttctagtgcaacttgaaaagatctaaagagtacaatgttgaataacagacaaaaggcctgagaaacagaatgatgtatctatttttataacttgaaactgattttgaatatgtgcatgtattgcaaacacatataaataaatgaataaacaatgaactaaagggcacaaattttgagacagtcagggactgtcatggtttgcatctgattgtcccatataggttcattctaatgtttgtttcccagatgatagtgctgttttgggaggctgctgaactttaggaaatgaggccaacctggctgaattaggtctctaggaatgagcccttgaagactatactcagcccctaattcctgcctccttctttgcttcctgattcactgtgatgcaaacagtctccattcactgcatgctccttctgccatcatctgagttattttacctttctttcctgccatgatggacttaaaccctctgaaactctgtaccaaaataaatatttcttcctttgcattgcttttggcaaatatggtcacatgacataaaaataatgaatacaaagatgaccatggggacaaggtgtggataaactctctggccttaactcataacctgttacctgtcaaaaatgtgctctgagtttctcaatcaccatgggaataaaggacagatgcaatgctgtggacttactccatagtctattatccactgaaagtatggggtgtgtttctataatttccaactctttcaataattttattggccacaagaagtttgtgccataatagtctccaagaacaaactggttggttcttggaaacactactaacagttaattttggctcacagtttgaaaggatacagttgtcataaagagaaatcatgacagagtttatggcaataagttatgcagctgggtttctcacatcttggtggacaaggaagcagggagcttggaccagaagcaggcttgactttgactctccatcctccacagtgacttccttcttctagttagaatctatctctacattctacaatctccccaaatattgacaccatctggggaatacattttcaaacatgtaggcgacatttcacacttgaatcatgatattctgatccacacccccccacactcacacacttcttatgtccctctcataatccaaaatgtattcaactcaatttcaaaaagtcagtttcaacactgttcaagagtccaaggtctgaagtctcttctggaactcaaggcaatctcttaactgtgcacccttgtaacataatttaaaaattttttattacgtaattctgacttttaatggcagagtaaaatatttccactccaaaagcagaatagaatggagataacagaccaaatcaggactgaaacacaacagacgatgatgctccatgtccaacatctggggttcctggtggcagtatctggactccaatgggcttggatagccccagctttataactctactgctgtaatacacatggcttctctcttgggctggcatcccaagatcatctttcctcaagtgggtgtctcatgttcctggcatgaacagtggagatctattggaactcatgcacggttcaccttcacagcttcaggcacaacccactcaggagttccacataagaaatcaaaccctgtgacacaccagtctcagcaattttcttgaatcttggtgcaagtcttaatgatccaataactcttaacattcttcatgttagccagacctatcactatgtggtaaccagtggcacattctaaatgtggtttagtccccttttcatcatagcttagtgacctctgaatgcctgtgaggccaaacttgggtaaacatttccttaggtggctgtcttggagtggaacattactactgtggcattggtttgggcactttccttttaaattcaagtttttcaagcatgctctcactgttacactatgaaggtttcaatgggtggagacatgtctagtgcagagatctaggcttctctctatttgtgctcatctgtttaccaattacttctgctttgtcggcaacttcaaacttgcttatgcttcttttctcaccaaactgagaaactgtcacatcttttctgctgtacgctctcctcgatcacactacaattcggcctaagagctgaattatcaacagtaataatgccacaattcaaatgctatgctgatttgaaactctctttttactttagcctcactcagattttcaggacactggcagaatgtagtcatgttctttgcccgaatgtaacactaatggccctcaagctcagttcccaatagactccttgtttcccttctgaaatttaatgagttagacttccctatctctattttttccagcattgccggcttctgattttctaccagttttactcattaaacttatcacagcaacaccccactctgtaccagttccccctattttcctttcccattccagtcatagaatattacagaaacagtttgagatgaaagaagttattcaggctcatagtttgagaaagcacagtccatcaaggtgggaaaatcatggcagggcttatggggacaaagcatatgactggaatgcctcattttttttctggtggtctggaaagtattggtcttgggctagaagcaagggtgggttatatttcctgaagtctgtcttcaatgactcactttaatctagctagtctctacttcctaaaggttccaggccatgctaaaattgagcacattttacatttgaaatacagttcaatattaaacagtaaattctgagagacattggcaagcaaaatgtgattaaaaaataagggatgatgaaaagacttgtagggaatctgtacatgtaaggatagttaaacaaacagagatacaatagaattctaagggaagaaaagccttaggaattatcttgtaaactctctcacaagtgcattttaagaagggaagacatgaaatttgagaagctcacaataattcatgacattgagtcacatagcaatgacaattattgtcaaatatttgaaaacttgtcatgtggaagaggaattagattattgtcaataactagggcaagagcaggcaaactctaagaagtgttataacatatggaacatgagaaactattgttgggaggaagcccaaagaaagggtggatgatgtttggacagagaacttgacagtgttcagtagttttgttgttgctctaaggttaaggcctaagaaccacctcagctaacaacctcaagacatgaacttatctaggaaatttaaacaaacgtatctttagcaactgatgagtgggcaccagaataatcactaatcctgctatgtccacatcttcagtgttcatactaatgttatctgaaggacaccagatgtttttggttctatatatttaaaaaaaatcaatgaattaggagttcctagggacaattttcttgtttcattgtcctggaacaacagtgattatcttaataatttagatgagacttttcttaagaatttagtatacatggcaaagagaaagaataaataccagactggtaaaagatgagttaacccattagacagtgtcagtttcagggaaagaacattaattgatgccttccttactcttcctgagtttggaattgattttgaaacagaagaatcacataggtagaaaaaaagttccaactccattattaataaatatgtttgtcaaatgagactttaggtggcgggacatgtggttggcacactccacaccatgcctggcacttagaaacctctaggtcagtgttctcagcctatcagtcatgacccctttggtcaaatgatgttttctcaggggtagcttatcagatatcctgaataccagctatttacattatgattcataacagtagcaaaattacagttatgaagtcacaacaaaaatcattttatggctgggggtccccataacatgaggaactgtatcaaagggtcacgtattaggaaggttgagaagcactgctgtaggtaaacacacaaggtgattcttacactggattggagaaagtgaggggtagagtgggagagaagccgaagacttcactgagatgaatgactctacctcggaaaacatgcctatttcgagtcagggttagactatgaagaatgctaagattccattgcttatttaagtgattgagattatctgtccttgtgtgtgggggggggggacagacattgacatcaggtgtcttccttgatttctgaccactttatttactgaggccacgctctcactaaacttagaactccccagttcagctcatatagctagttggcttaccctgaggatccttctatctccctggtgttgggattacagggaggcccccatgcccacccagctatttcatgggagtgctaggggtcagaattctgaccctcatgattgtgcaggaagcctgctttttctaccgagccaactctccaggaaggctatgtcttaagatgttctcaagccagatgtggtggtacatgcctataatctcatactcgggagcttgttcaaggatatcttggactgaaccccccctctccctctctttcacatctcccttcctcccttccctctctctcacacacattcatagtttttgttctatctttctctgtctgacactctgttaataacttttttatttctgagacagggtctcacgatttaaccctagctgtcttggaatttgctaattaggccaggttggtctgcctgcctcttcctccagagtgccaggattaaaagtgtatgctattacacccaactattaagaccttcttgatacccccccaccccagttgatataaacttcactaagctaaaagtaactcaaagaccagcttattcctgagtttttttctctcccaaggttggcagtaaagagttgttctgctactatgccagccagcagagtaatccaggaagcctcagaagccacattaagtcaaattttccagcaggctgccagtaggttttatgcagagatggaagagcacagcaagaaaaaccagatttttttttttttgaagattttttttatttgaattagaaacgagattgttttacatgacaatcccagttcccttctccctcacgtcctcctctactaccccaccaactaaaaccttacctatcacatatcctttgagcttttaatttggtcagtaggtcccgtcctagtaaggggtaggggcaatctggtacatggaggaaagaatgcatgaccttaccagtcgcgagctggagctgccgatctgtagtccaatgatactgctttctgcctgtagccccctgtacccatgcagtccggtgactcagggatccgggcgaccaattcagaacggaatgttgtgcccttatatctactaggaaggtgaccggatgccccccgacttgcagtgttatcctgggctcagggggggggggctcctggccctgacttctctaatcttctaggttcaggaggtcagaggtccttggccgtggaggcttggcccgggggttcttagggcattctcttgcccaatgtcctttttctttgcagtaagcacattggtccctgtccaggtggggcccccttctgtcatccctctgtctattctgtctctggcctgtcactactgtggccaatagcctgctcatttctttattccgcttacggtctctcgcaacctctttttcctctgcttcctgtcttagtctttcctctctctcctgggtttccttcctccagcgttcttctctttctgtctgtgtttccctcttattaaaaatacattctgcttccttcaacaaatcttggagtgtatatccctgtagattttctagcctttgaagcttgtttcttatgtccggggctgactgccaaataaaggacatagaaacgttggtggcctgacctggatcttccggattatagggagtatacatcctgtacgcttcttttaatcactctagaaaagcggcgggcgattcctccgccccctgtatcacctgctttacctgggccaaattagtgggtctgcgtcctgccccccggagacccgctaggagcaactggcgatagagacgcagatgggtcctacctgcttcagtggtaaaatcccattcaggtctttcaagagggcaagccgcatcaatttcattgggcagctgggtgggctgcccgttggctcctgggacattctttcgtgcttctagtagcacgcactgtttctcctccgaggttaagaggacctgcaaaagctgctgacaatcatcccaggtgggttgatgagtcgtgaggaccgactttatgagagatgtcagcctcacggggtctgcagaaaaagaaggattattatttttccagttatagaggtccgatgctgagaatggccaatactgaggttggccatttagtccagtttggaggggcaaagtggttgaatctggaacgggctgctccctgcaacctcttagtcgataagccattggtgaagggtcaggggccgcttccgccaaggcggcggcggagtccgcttctgcctctggtgggggcggcggtggcggatatggcgggggctcctcagttagtagatcaaccaacaggtcttctcccgggggaagtaccttaggtgtcttcttttcttcagccttagtgtctttcaccgaggtagggtaaaggttggtgtcccgcgcgctatgttctcgccggcaagaaacacacaggacattcggatccttctgcaggaaagctttaatgcatcttgagagagagagagagcataagcttaccagagcggagaccccgagccaagaatcccatcccctaataaaggctggcagcggccgcctgggacgtgtcaccctatgaatggcttcagctcctcaggccaaatgagccacgggataggcagagatcaaaggaatggaaattaccaagcgcctgcgaaataatttacattcggtgcctgcaggcaccatcattgtaatggagaatgcagggacggctccctacaggttggaatgggaaggggggttgggagggttgggaggagttggtgtcaaaggagtgggaggtgtaggggccgagggaatgggttggctacagcggttagaggggggaaggagagaggggcccttgggatgtaagaaaggacatacccagggagggggatcctgaaccaaagcctcccaagtgacgatataagccacttgatcaggatgcccgtgtggtccaggatccatagtcttctcttttacctgaaatatagtctgggggttaaaggtaccatcccgcggccagcccacgtcaaaggtcggccattctgaagaacagagagtaatccatttgcgtttacgcacatcaacagattgattatgggcatactcctgtacatctctccagtgcgagagtgttagggacaaaggagtggtgacagtttgccccatagtttctagacctaggaggacacaaatgatagttacaagataaagaccgaataacacagaacaggctttcgcggcgcggtttcggcacaaggtcgaaagtaaaatttgagagggggtcgaagaagggggccccccttcctcgtccccggtaaggattacaaatccctcaagccgagggccttctccaaagagactgggaaaatgtccagtcatagatctaagttcaaagacaaaagtacaaatccttcacgccgagggcttcaatcgctaccaggacgtctcctggagccgcggtcgggagtctgaactcgtcagttcctccttggagccgccaaatacaaatgtacgcagctgtgtactacaaacgcaagcgcaattcataagacggattcagacagacaggcaagacaagacaagacaagacagtggatccgcacaacacttacctcccaaacgtgggtcggtggtccctgggcgggggtctctatcccggacgagcccccaaatgaaagaaccccgaagaggtactttcgtagaaggagacctgtacccaagaatcagcgagaccacgaacttggatgcaaatagcaagaggctttattggatacacgggtacccggggcgacttagcttctgtgaggccaagcgcgccgagccaagggagaggggtccttatatagcaaaaagcacaaacgagaagcagggattctattggataattcaaatgaggcgcagtacagagctattcccattggtcaatgtatatgaggcgctactcagggttattcaaatgaggtgaagtatagagtcattcaaatgaggtgaaatacagagttatttctattggatggttcaaatgaggcacagagccattccagaccagcatattctcaaggtctggtgtctggtacaacagactcaattcccccctccgcgtccaaatggctgaccttgggggtggagaccttgggactgagtgttccccaccgggagggggcatgggggcggggccccggaccggctcacctggtgctcgccctcgggcctcctcgcgggctcctcgctcggtcccagccccggggcgcggtgccaggtgggcgggcagggggcacgggggccccgctggggtggaccagctttggagggaacctgcggccagctgggcgtgcggcggcgggggaagtggaggccggcgggggtggggatcgggaaggcgcaggagcggaggcatctgccgcgcgccccatcagccgccgaccggaggaggaggcaaacttgagaaagagagggctaaggggcaggggtctttcattgtcagtcatcaatctcattatcaggggagggcatttaatgtagcctctcctctgttgcttagattgttagctggtgtcatctttgtagatctccagacatttccctagcgcctgatttctctgtaaacataaaatgtctccctctattatggtatctccattcttgttttcttctattcttcccttgactcaacctttctgctccttcatgtcctccgcaaccctcctcttctccccttctcattctcctagctccctccctcctcttcctgtgctcccaatttgctcaggagatcttgtccctttccccttctccaggggaccatgtatgtctctcttagggtcctccttgtttactagcttctctggcagtgtggattgtaggctggtaatcctttactctatgtataaaatccgcatatgagtgagtacataccatgtttgtctttttgtaactgggttacctgtgggggacagggtcccaggttctggccaccataacagtggtgggccaggaaactccggaccactattgtattgttaatgtcagcaggagtacttttgtttaccatggcctgagggtaatatgcctcttatttgcatctgtatgtgcctaaacatctgaataggccctcacctgggtggagggctagagataggtgagtaacatatgaggacagaaggtgaggagcgaaggggcgagagcaggagagagcatcgaggggacaaagagagaaatggttgcctcgcagtatgaacaggatggttatgagacaccagagaagatggctaataaacaaatagctcccagttgcacaacatggaactgagagctctctgaagatgacaagatgcctgagtttggtctttatcgccgttgggttcctagaagcttccaggtccacacacccccaaacaggtagaacctcatggctgtcgtaggttaaagttgagacaagccgggtcacgacagttacctcactcagagtggtttcttcgagttccatccattttcctgcaaatttcaagattccattgtttttttttttttttttttttttttttctgctgagtagtactccattgtgtaaatgtaccacattttctctatccattcttcggatgaggggcatctaggttgcttccagtttctggctattacaaatagtgctgctatgaacatcgttgaacaaatgcccttgttgtatgaatgtgcttcttttgggtgtatgtctaagagtggaatttctggatattgtggtagactgattcccattttcttgaggagtcgccatactgatttccaaagtggctgtacaagttggcactcccaccagcagtggagaagtgtttccctttctccgcatcctctccagcataaactgtcattggtgtttttgattttggccatcctgacaggagtaagatggtatctcagagttgttttgatttgcatttccctgatggctaaggatgtttgtaaagggccatgggcccaaagctatgctgtttaaagcccactttttgtaagctttttatgacctttaaagtttgcggcttaaagcccaaccccgtgagcctcatgtgaccccataattatgtttggccaagtgggactgctaacgactgctgttctgagaaaagaccgtggggcctttctgcctgctgtttcgaagaatgttccagccccagcaaataccagatgttcattcctgctattcccccccccgcccccgcttgcctaacttcctcattgcagggctatataagcccactctaagccccaataaatcaagaccttgacattgcatagatggactctggtcctttttcttgcgctgcagggtctccttcctttctttcgcccatgactctttcaggcagccccccttcggaaccctgaatgactggacccgagacggtcaagtggcgcctgaccaggggacctgaagtacggttaagctgtcggatgtcggaaagacagcccgggacaaagaggatcctgcagacagccagactcgagctctctccaggtggaggtaaggtaccaatcattgctgtccaaatgccatgggtactttcattagtaaggagttgcaatttataagaaaactcaagactatttagggagaaaggagtaagagttaaaaaggagaagataaaaagaaatgagtcaaaaagaaaaatttagttcatttttttctgttttattgataaagcttgtctatggttgattttaatgggaccagacatagctccccagacctgggaaaaggttgggagagttactttgcccacagcgggggacttgcaagccgcccacagcgaaaaatgctgctggcagcatttcttagaggcggtcaagcttgggggctgcaacttacagccttgggagatgccgccatggttgatggctaattaatgtatataaatgctattgatacagccagacagaaactgtttttgagacttatagaaaaggcaacatatttaagcttagaattgttcaaattttggatgctcataattcaatgattgactatagctaatatgttaaaaatttcaattagggatttttcttttcaataagctgatcataacctaggcaaaaggagaaatatgagacatatgcaagttatgaatgaacggtgtggccacacttggatgcatgatgtgattgtgaatttatgaatgcggatgaatggaaatacctaaattgccttggatatgagtagagatatttacattgcctcagatattgtttaaaaaatatcaaaatcactttaatatggtcaaaaagagcatccagtcagtcagtcagtcaatgtcttaacaggggaaattatgatttgagccctaggatacaggcaatgtaaaagttagtaaaaagcctatatagcattagcttagagacatgagaaatctatggatgattctgtaaaatttggcagatgagaggatacagatcttcctagatttttttggttaaaaaaggacacctagaaaataaaggttgatgcatgattttgagaagggtttgtgagaagcctcaagaaagagccaacctgttagattcacagcttggcaggtcagctaacatgtaaatgagatcttatcagcttgtcagcctcgaaggttagattagaaaaggctactcaaaaactctaaataaatctagagaattgttaaagacatatgttatattctaaagaaattaaggcttaatagataacaattggaaaagatactttaaaaatctttaaatgagttttttagaaattgttataaaatattcattggttaagtacctttttttgggacatttaatgatgatttaaatcctttaagtaaaattctataaggagataatgatccagatatacccaaacagctaactagaaaggtagacaagttctataattagaaaaggcgattcagcatcatcatatacaaaaccatgggaagcttatgtactccccacaaagcattgtccgatttctggtttatggcagaaggaaccattactatggttgcgcctacctgtattaccagcctaaatattttaaacccttattttaaagcattagcctacatgatacagaaatgccatatagattctaagaagtattttaggagaaaatcaagtatgatacatatctcctactctaagcaacagtttaattggttgattcagaacaataagtcatagtccatggattgcctttgctcaattttcaggaagaattgataatcaatttctagctcatggactgttacaatttgcactatgcatccttttgtatttccaaaattgtaaaaagcagtcctttaaaaatatactatgttaattttttaccaatggttctattgggagagtcacttacataggttattaatagaaataaatagatagagcagacagctctgacttcagcccaaataatcaaattacgagctgttgcaacggcttttcagatcctggtaaataatctgtttaaatttacatattaacagtcactatgtattaaaggatcttatggtaatagagacaattccatacataggatccaatattagattgatttaagcaaattcaaaatattattcaccaaagaattatcatgtttatgggtcacacgggggaacctattaaataggcctttccttaattactggccaaatgaaatgaattaactgattagcaaaattggttgatttgcctcaaatagaaaaagctcgacaggcttgtaacttttcttcatcataatagcaagtctaagtaagaaatttggcttaaccagagagactgttggtcaaatcatcaaacaatgtggaatatgtccacaatatggctatggctaattaagggtgaatcctcaaggcctgctccccaaccatttatggagaatggatgtgactcacattacagagtttggcaagttaaaaatgtgccactccacaaacaggagaagccaccaggcatgttttaagtcactgtttaagatgttttgcttatatgggagtgtcaaaagttataaaaacagataatgggtctggatatactagcaaagctttccagcaattttgtgcttaattcctgagaccagtgctaccggaacagcccgtgtggcctagtcccgcccagtgtgcgaggacctgcttgctgagcccgtagcagcgggcacggctgggcctttgggcctttggggacacagcatgctgctgacttgggggagtgaaatgcctgcctccaagcttctgtagcagcagtgagacatgaggcgagcccacagctcgggcagcggcggctcctgagcctgcggaacgcacgggccaggcgctgtggagcacacctgtagtcccagctacttgggaggctgagacaggaggatcgcttgagtccaggagttctgggctgtaatgcgctatgtccgcactaagttcagcatcaatatggtgacctccagagatcgggcggccaccaggttgcctaaggaggaggagttctataccatgcattgtctgctaaatttcctcatgtatgatgctacagaaaaatcagcctcggattgcctctggcatccatgaatggctcaaaattatgctcaagccttatggaaagatcccctaacttacaaatggcatggacaagatccggtcctcatttggggaaaaggacatgcatggatttttgatactcaggccaataatgctagatggttgcctaaatgccttttaaaactatataatccacccaggggaagcccctgagaagctttctaattctgcttaattttagataaaggatgctatctttctggctacttgggcgtttatcaccttgattggtgttgccgctggaagcccttatcagatctacaaatacacctggatgatcctcaactgagccagtgatgctgccaatgcttccacaactattgcaaccaccccctcctattcccccctgatagttgacttatgtgctttagccttaggggcctctccagactagggaacccctgaccattttcccccaggacctccctcctccgatgaccttattctcttcttaattaaccctactgttcaggcccctcatcaagccagccactcccttatagaggacagttgggtctgctattcttccacccctcccctttatcagggaattgcaggcatttaattcctaccttgcctgttctactagattgactatttaaattgtcacctctaccttttcaaaaactaaccagattcattaagtctcagactgatgccatcctcgaaaaactggttttgatccactaccattgcctagaggcattagattctgagctgcctgacgactataaaaacccccacagtcctaaaggactggaattcttaggccttaaaatccatggtaaatgcttctgctttagccttacagttccttaataattctcgttatcaggaatgctggatttgcttttcccctcagccgcccttctatgagggcatgctgacttttgaaaatcttatcttcactaatgagacttcctcactaggatggcattccgtgaaccaggagggcgtgaccttaagccaggtctcaggcaaaggcctctgtattagaggaccggaacttcgtttcccagaacccttacagccaatatgcaaccaaactatcattattagccagtcatctacatatatagctgcacctgatggaacttgctttgcttgctctctgggactcaccacctttatttccacctttcagtttctagagagtaaagatgattgcgttttggtacagttgttgccccgcctaacggtacatgccccggaggagctgctccctagttgggaggaaaggcccccgtcacaagagagagcccattacagccatcaccttagctgtcctgctgggcttaggggcagctggagccgggacaggattagcttccctgataacttccaaacagcaatatgcacaactgtctatggcagtggacatagatataaaggaattacacacaggattacaaaacttaaaagacttatttgtctctctgtctgaggtggtgttgcaaagtaggagaggtcttgacctggtctttcttaaagaattcggcctctgtgcagctcttaaagaggaatgctgtttttacaaagataaaactgggttagtacaagatagtatagaaaaaaagaaagaaaaatctagaggatagaaagaaacaaagagaacaacaagagtcctggtataaaaattggttttcaacctccccctggctttctactttgctaccgtccctcctgggaccacttgagttttttgtatattttggagatcagccctctgtcaaatgtggggttggtgaatatcttttcccagtctgtgggctgctgttttgtcttgctgactgtgtcctttgccttacagaagcttctcagtttcaggaggtcccatttaacaattgttgatctcagtgtctgtgctactggtgttatgttcaggaagtggtctcctgtaccaaataattcaaaggtatttcccagtttgtcttctaataggttcagtgtggctggatttatgttgaggtctttgatccattttcacttaagttttgtgcatggcgataggattgggtctatctgcagtcttctacatgtccgcatccaggaaaaacaagaattttaaaatcacattgcccctcttctgacctctcttggaggtagttgcaggatcctcttaccctgagtcacacacacacacattggcaaaaacttctaggtggagacatttgttaattataaataaaatggaataactgaagaaatgtcgagaataggaataatgaagaaatgtttttaaatattcaaagaatttaaagatgggaggaggattgattttattccagtctaaacagaagaacggggtagatgcaggcttagcaggctgcggatgtgacgatgcacaagtatagaagccgcttcctacccatgcttcccagctcattcctccattgccctcagtatttccaaagggactaggatactgttgggggttgtggccccagaagcaggcccagctctatgaccttctgccctgcccaccagttcccctttctctgtagagagcagtctgcatgctccgccttgacagcagttttccctgagctaaggcagaatgaccacggagcagctgaccaccgtcccgagttgcagagctgaccatgcacaacagctaccaccttcacagtctaataagcaacttatccctgctagtaaaagaaatcactcccataaactttacatgttataatacagaattctctaccattaaaaacaaaacaaaacaaacttttgctatctgaccacatactgcgtatgcttagaagtgctcccacatgtctacatgggacattgagtctttcctatctaaatgcatgtaagttttcccactttctttgtttcagaagaccattgatttgagaacacctccattgttctctttgtttggcaaaactgtctccactctttttttttttttttaatctgacttatttatgttgtgtacattggtgttttgcctgcatggatggatgtctgtgtgatggtgtctcatcccctgcaaatggagttaaagacagttgtgaactgctgtatgtgtgctggggattgaacctgggtcctctggaagagcacccagtgctcttaacctctcagctatttctccagtcccgtcttcactcttttatcttccatttgtgcttgttggctttgccctcaccatcagctgagctcattgatttcggtacacatcagtgatggactcagggctactggagtgtgaatgtctcctctcccccagaggcaatgatgtcagggatgtggtagagaagactgaggaatttgatctgggcacagacttcactgactgccccctataatcgcttcaaaccctgactatcttcacttatgtaaagcaaaatgtttgatttatgaggctggaagatctttgaggcaaaacaagtaaataaaagcaagaaatttgacccaccaatctctcttgatttttaagtctcttgtttcatttcctcctcttccaaatcatgtcacacaatcctgatctctttatgatctgtgaccatgtcagtgttctttggcagtttctgttatgggtgactttttttgtcttctttagaattttccttcttttctgtgattccaagtgactttataatgatgggatgtcaaatagtggttctattcttgacctaagttgcagaatctcatttttggtcatttcattaaatttctctgcgttcccatagtcagaccaaacttctcacataaaataatcttatctacttgacttccgaagtctgagttgagtggacctcccatctgcttagttgggtcctgtaattatggtctttgtgttaacattatcagcatccacttttattttccactgggtcccaacaatgtattgaactccttgtaatcacccatttatgtagttcagaacacggttttgctcaagcaactgcatatacaacagtggccccataagattactgtagggctgaaaaattcctatttatagtagcacaatgcattactcagacatttgcagtgatcttggtgcaactaaactaaccactttgtcagttctatagaacatatatgcctatgcagctcacaacagctgataataacttcgttgctaaccaatgtatttatatattataatttttgttcattgttctattgtttttgccttacccttgttaagcagttttgttatcaacagtcaagcagcatgcagagcacagcaacagacactcatctatcttgtgccatgtttcagaccagtgcatcatttttctcttgtgtttgatctattctattgttttcttaagtatggactgaggaacaataagctaatacacatacataccatagaaatgtagtcagctctaccatttaggcttgtgaaagcatattttaagatcgctgaacaatggtaaaattgcctagttattcatttctaagaaattatcctcattgttaaatgccatgggactattttattttctgtgctcaatgtagctccattgctggggttcaaattcagagcttcataggccgtgctgtactttgaataggatcttcactcatagagctactgacacctagtggatagagcacaaggatgctgttaagtgagcagaacaacccatcatgacaagttctaacccacagcaggaacttagaaactgtacgttaatgaatgaatcattgagtacaagtaggattcttcagtgaaatgacttactgcagttaaccatgcttagaccttgtcactaacccatattaagccttctcatctgcttcctctagcttgtaagtgttttgagctgaggtgaacttagttatacttttggcaagtgcataacttaggccacaaccttcagatgtagaggagagccaatggtggagccaatggcgtggattagatgatttttgtcacactaccctcgtgtggacaatgtgtagaacttgttttgagttttgatctctctctctctctctctctctctctctctctctctctctctctctctttctgtgtgtgtgtgtgtgtgtgtgtgtgtgtgtgtgtgtgtgtgtgtgttttaaggcatctgaagaaccttggagtgtatgatggctattcttggtgtcaacttgactacatctggaactaaaaccttcatatggagggcatatctgtgagggatttttttgcttaattttaagtaggaaaatttacttcttttatttttttaattaattaatttattttacatacaaccacagtttcccctactctcatcctgttccctcccccatctccttctattccccccatccacccctcctctatctccattcagaagggctaaggcctcccattggagtcaacaaagcatgacatatcaagttgaggcaggaccaagttcctttcccttgcatcaagactgggcaaggcatcctaccatatggaatatgttccaaaagagccagttcttgtgtcaggaacaagttctggtcctactgctagggaccccacaaaagatcaagctacacaattgtcacccacatgcagagggcctaggttgatccaatgccagttccctagctagctattggtccagagtctgtgagctttcccaagttcaggtcagctgtctctgtgggtttccccatcatggtcttgaccccccttgctcatataatccctcctctctctcttcaactggactcttggagttcagcccagggcttggctatggatctttatatctgcttccaccaaatactggatgaaggctctgtgatgacaattatggtagtcaccaatctgattacaggggaaggccagttcaggtaccctccccactattgttatgagtcttagctggggtcatccttgtggttcctgggagtttttctggcaccagttttctccctaaccccataatggccccctctatcaagtatttctttcatgactccccctcctccatcccattcgcgccttgaacaccctgatctctcatgttcctacccaccatcccctcccctccacccccgcccagcccctagtttacccaggagatctcatctacttctccctcccagggtgatccatgcatccctcttaggggccttcttgttacctagcttctctgggtctgtggattgtagcctggttatcctttgttttacatctaatatccacttatgagtgagtacatactgtacttgccattctggatctgggttacctcactcaggaggaaaatccacttctaatgtggatctttgagtaaggaacacacacacacacacacacacacacacacacacacacactcacacacacaccctttaatccatatcttcccagctgggaaaagacatgcctttactccagctcttgaggaaggaagacacaccttctgctagaaactataagggacacaacagaagaaagctcttgcactttgcctgcttgccctcaccttgataacatgctcattccttcactggcattagaacctacttgttggtattcctacagctactgaagaccagctgagacacacaacactgtggactgagcaactcctggattcttagactttccaatcactgccatccattgttggattagctggaccacagcctgtaaatgattctaataaatcccatgtatatgggattatatatgtactcatatataaatatttatgcaatataaatgtttataccatataatattagtatatttatattatcaatattaattttatgccacatagttatatgtataatatttatattatattaatataatgaatatatatattcactctctctagagaatgttattgtagagaatcataactaatgcaaattttggtaccagacatggttctagaacaacagaagtataaggatgaatcttttaagcatctagaataggcttttcaattctccatcacctacagttactgaagcctttctagtccctcttttgggagctcagagagtactgaaagcccatggggtgaactatattacaaagttaggagataaatgcactttatatgctgatttcaccaattgtgagtgacaatggatttggtgaccctgtatagttggggagaaaataaagaaaatgttgatgctggttggttgctcttagtgtctctggataaactgacaaaagatagggttgagctctgagataaaatcaatctcagattagcatctcagaatatggtgaaacacagtaatgaacttagtgataaaatcatccagctccagatgcacataaacaatctaaagcagcggttctcaaccttcctaatgatgagacctttcaatacagtccctcatattgtggtgacccccaaccataaaactattttcattgctacttcctaactataatattgctattgttatgaattgtaatgtaaatacctgcattttccaatgatcttgggggtcttggcccacgggttgagagccactgatctaaaggattctaagtgaacctgggagagaatcttctctcctacagccacagagatcaagttgcagaaaatcaaaccatagcccttgttataagattggctgaataatagcaaaaattaaagttccagcctgggagtgtgtcagtggctaacgtaagggcactaattggtacagaatgagatcctgtaacttgggatgaggatgtgtggaaggatcccattgaagctgagaactttgccaccttcagattttcaagagtttatctcacctaaggaagtagtgccatcactcccaccccttgaaacattgcctttctcacctttgactgaggaaattaatccttcatcatccactaaaccagctgtgactgtttctgaaggaaattccaggaaaacaatactcctgtcctttaaggcctatcaatagttgcctttagttctacaactagactgaaggcatagccggctcctaggagggagttagaaagtagagtcatgaggaggtatggtatgctactaaagagatcaatgagtttgctaattcattcaagtacaagtctggggaaatgggtgggaatgaattttcaagggtgtgggagtaagaacataaaactggatcaggctgactttattgatgcaggtcttctgagtggaggttctgggtttaatatggaaactcccacagtttttttttaaaaaggtgtcaaaaatatgtttgaatggttgactgaagcatttgtcaaaagatggcctactgaaatgaagttggcgaggcctgatatcccttggcttagtgttgatgaagggatttttttaaagctcagggaaattgaaatgctaaagtgggcaggctgtgtaaaacctaatcctccacaacgggaaggcccaaaagatatgcccttcactaatcctataagctacaaaatggtgagagggcaccagcacagttgaagggttttttttttttttgtgtgtgtgtgtgtgtgtggctctttctcttgtgccagaccttacgtttggagatgctgctgctcagttggattaattttaacttggccctgaggtggcagcactgaggtgacaaaggcagggtgattgtagttatcataataggtagcatagacaaagcaatgttcataatagcctaaccagtaatagcacaggcaaagtgaattttatggtggcatgactcatcttgccctttggaagctgataatcaatcatggtgtttgttgtaacaacaacagtaacaacaacaaaagagtggcttgagagaaagacaccatgcaacacagttcaagcagaggtttttgttttgttttgttttgttttgtttttaattaagggaaaaggatcctaaaaaagggagtgggagaccagcctccaggaacaatgggaaagaggaaagagaggcagagagagaggaacagacagacaggcagagggagagaaagagagagaaaggaacacagagagagacagagggcgaggaaagaatgagagagagggatgagagcgggagggcccttttaaaagggaaaatattgaataggcacagatggtgctcttagtggcagcagctgagggtgtatcttgtcagagttccaaaggcaggccagtaaaatgcctaaatactaacagtgttcccaagcatgaaatagacaagaagcctactgaatttttgtttaatcttcaaaagcagaaaaattctcaaacaaatgatagaaagtctacactggaccacagcaaaagaaaaatattgccccatgaatcaatttccagacttgagtcagttttcagattcagaaccccttgaatgaagggacagctaggttctcctgaggaagaaccttggtaaacacctaaaagttttagtcaccctttctcctatccttccccagagggacctactgctgtttataagggtaaactgtacatttgggggaaggaaacaaccagacttcccagagtctattggatgctggctctgacttgatgctgattccagtagactccaagaaacatgtggtcctccagttaaagtctggagcttatggagttcagatgattaatgaagttttggctgaagtctgacttacagtaggtctaatgagtccccagactcatcctgttgcttatttccccagtaccggaatgtacaaatgggatagatatacttagaagttgtcagagttccctggttggttccctgacctgtggagtgaggcctattgttattggaaaggctaaatggaagcctttagagttgcctctgccaagaaaaatagtgaatcaaaaacagtatggtatccctggaggaactgcagaaactagtgccaccatcaaggacttgaaagatgcagaggtggtggttcccaccacatctccctttaagtctcttatctggccagcgcagaagacagatggattgtagagaatgagagttgactgtggaaaactcaatcaggtagtgactgtgagcagctgctgcaccagatgtgacctccttacttgagcagatcaacacatctcctggtgcatgggttgcagctactcatccagcaaatgcctttttctcagcacctgctcataatgaccaccaaaagaaatttgctttcagttgggaaggcaagcagcatacctttattgttttgcctcagagatatattaactctcaatccctgtgtcaggaaaagagccaaggcctgctgagtctcttgccaagggttgaagaaatacagaatggatagtagaggaaggtagttataaatattagctaaggcctaaccagttacagaaatgaggattataaattatagttgacatgaatgtttctgctatattttaagaatgcatttgttctttcttttctcaatttctttctttctttctttttttttttggttttttgagacagggtttctctgtggctttggaggctgacctggaactagctcttgtagaccaggctggtctcgaactcacagagatccacctgcctctgcccccagagtgctgggattaaaggcatgcaccaccaatgcccagcaaattttttatcatgtgatgtaacatcatttgagagaataccagtggttacacttaagcttgagattctaaaagaatgtcccttaagggacattaccacctgttctaaatttgcaatgtacttgtagttatatgggggataattatatcatgttggttatacatgttatattatggttaggcactattatgacctggttatttttttcatttgaaaattagtcacaaaaaggagatataattgtgtgtcaagttgacaaggggtggacttgtgatggctatccttggttgtcaagaatattcttgactacatctggaactaaaacccccagcagagggcacacccatgagggatcttttgcttaattagaagaaggaaaatcaacttctgttttgagacagggtctctttgtacacaaggctgcagcctgggctgtcctagaactagctctgtagaccaggctggcctagaactgagacatccagctgcctctccctcctgagtgttgggattaaaggcaagcaccaccattacatggctggaaggtccacttctaatctaggtatttgagttaggaacacacacacacacacacacacacacacacacacacacacacacacacacacacacacacctttaatccaaatctttcaaactgggaaaggacatacctttaatccagatcttgaggagggaagacatacctttaatctgggccacaccttctgctggatacctataaaggacatggcagaaggaagcttttgctctttgcctgcttatccctaccttacttacacattcatttcttcactggcgttagagcctgcttcttcaggcttccagcatctaccgaagaccagctgagacatccaaccttgtggattaaacagtttctgtgcaaagccagccattgttggattagatataccacagcctgtaaattattacaataaatcccccatatatacttattacaacatatatagatggatagatacatagattcagtctataaattctgttactctaaagaaccctgacttatgcagtgtgtttagtttattgtaagctaagtaaaggtccaggggtcagtggttctcaactaggtattttgcccacttggcaaaacctagcaatatctggggccactgattcttttcattgctgaggttcaaattcagagcctcatacaataggcagtgccatacctttgaatagtatcttcactcatggaaaggggggaatagaggatgggctactggcagtgggtagagcataaggatgatgttaaacagaaagaacaaaacatcatgacaaaaatttgcccggccccaaatgtcagttgagaaatctggctccagattcttctactaggggaatttagggtgtgtgtgtgtgtgtgtgtgtgtgtgtgtgtgtgttgggggattcagagaagggaattactgtgacagtgacaaaaaatcaaatgctctttagacacagttctatcctctgtaaagagaatggatcctgggttttagcagagggagaggcctgggactcactcttgtccactctcttggagaagaaaaagccccacaactcattttaccaagacagccacattagatgtccacagacaaggctatggagtcatgggttgtggaacatgtccagtcacactgtcatactaagaaacgtaagactgaagtgagcctcttgcagtggattaactatattttattaatttccccagagtggaactataaacacacacctataattcttgcacttggaaggctgaatcaggggactgggagctcaaagctgacatggaatgcataggaagactattttttttaagtaggagaaccataacttttagggggcgtatgagcacccagtgtcttcccagccaacatgtgcaccctgtaaccatcacacacaggctgtgtgactccaaaagaagccaaggactccacccaggcatcagagcattagcctttaaaaccgagaatgggtttgttcctcctgacttctccagaattcagatatgcttggtcaactgaaaacaacgttggaagagcaacctggggaattctgtcactgtagtctctgctttaataccgtcagcctgagggaaaggtgagcttgactcagtccagggccatttggggaagactgaagcacacaagtgtagtactgggaaaagagttctcttccttctcccctgcaaaccagacatgggattgcaggggggtgggaaggccaagcattgttggataggtggccaaaaagaatgcctctaaaacagcccccatcctcagtgaggtctggagtctagggattcaggaaagtttgggaatagaatcttcttggtttctgcatctccatcaggtaaaaacccagccacagcaaaaactaaagtgataggagccgattgtctattgatgtctgaattgcagtaaatgaatgggaacttgtaactctaggctttatacatcccagttctgagtgtctctatggttttcagaacagacagctagtcttccagatgtggtatggctgatgtacacatcgactcacaagcagccgtggctgtctgcataaaacctgcacaagatcaaaccagttaaaatttcatcatggagagagggatctcccaaagctccatccttagctgatgaattatcaacagttgatggctaatgagagaggggttaattttctttagagcatgtggcactaacaggattcagtaataaaaaagacagcattgagtcagaagaaaaatgagctggtgggtctctagaggaattgtaggaaggcagttgggatggatgcaatcaaaatacgttgtacatatacaatattttcaaagaattaataaaattctttggcctaagattgtacaagggcatatagtgagtaatttttggtctgtttgccatctaagcctcacttttgtttggagaactttctagttcataaaaggtagagtttaccagccactacaaaagtagaagcttccagataacaaatttataacctcctttggagatgtaagatgaggaaattgtgagctaggtttggccattctgaagtattaaactttgagttagaagctagagacaaaaagatgaaggaaggagcagtcattttggtggtggacaatgaagcaataacaactactattatcacattactagtgcagcaaagggcagtagtctatgctcagtgttgtagacaatggttacaaaatagtggcaatccctagagtagctttgcaatcttagtatggccctaaccacagcctattcttcccttaccctctttacttgcaaaggaagtgtgatggctattcttggttgccaacttgattacatatggattgaactacaatccagaaatggagggcacacctgtgagagattatttttccttatgtgaatacactcctggtctggacctttgaggtaggaagacacacacacaccttttctgatgcagatctgaagtgggaagacacttacctttgaacaaggtcttgaggtgtgaaggcacgactttaatctggaccacacctttttctggaagcctttataaagacatggcagaaggaaacttttgctctttgcttgcttatcctctccttgctagcaagtccattccttcactggaattacagcctacttcttcaggattccaatatctactgaagatcagctgagacatctaaccttgtgaactgagaaactactggattcttggacttttcattcatagccaactactgttgtattggctggactgcagcctgttaagtcattctgataaatcctcactctatgttcattctataagttctgttactctagagaaccctaactaataatgaaggtttttctgatatcttagtagttatttgaaccaactgacatattttcttttttacataaagattcaaagttagcttttttgattataattagaaacaattttatagaagttaataccacgaaatgggatacatggagcaacagaacttaacatttaaattgtctaaatacagaaaggtacagggcaatgggacatcagagttttgagctgggcagttggtgttctttgttatggaatgatacaatcaggtttttttatgcatgtgtaggtgtatgtagtgtgtgtgtgtgtgtgtgtgtgtgtgtgtgtgtgtgtgtgtgtgtgagtatgtaggtggctgtacttgcaaacatcacaggaggatgtcagtgtcttcctttgtcactatcaggggacttgatatttatgacagaccaagctagctcactgtcaaggtctttggtcctgtctgtcttagtgatacaggtactcatccatggccatcttttacatgggtgctaagagtttgaacccagatcctgatgtttgcaaagcaagtagtactatccagtgagacccctccttcccaacttcacaatagttatttcttaaagtatttgcccaagttgtgaaagaaatagagtaagttgaaagatggcctctctgagggcagacaacatgaagaaaataggactttaaatagactccttctgactacaacttgttatctaagtgattgaacatccaatcattcgaaactgttcaatcaaaataatttaattttcatttgaagataaatttagtacaaagaggtatgcagtgaataggaagtgattggcagacctgcagttccacaggagacatgggttataaagtggtcccagaaccaagggagggagaatcttgaggatcctgttttgttttgtttttctcaatggagtaaacagagaacttagattcaaaagtcttttgaagaagcgaaaaacctctctggaacaagttcctcttgttatgaagtgaaaaacctccctgggacaagttcctcttgttataaagttcccagcattaccaaatacttgctactttgatttcaaagaacgttgcatagtttccattctgtcttccaaagctttagattctgaagtcatcttcagtctattgacttactagcttgagttttgcaaatagaatactggtccttttatagaatgacctcaggcaatgaagaattcattcttcgaacattgcttcatctggagagggagagggagactgaggcacggatcaggtcttgaggcgaccaggatcagcttccggaataaagcgctaagaacatctccagactttgtgccttgtactcagccatctgagacagatgtttcacgtcctggctttttgtctttgggttttgttgtctaatccagcatagagtgagatgtttgaactcacatcatctattttgtctgctacagcaaagatggaatgctgtatcaagagatctctgctccatgtccgtgtgagctgcagagcaggtcgcctgcttgggaaccctcactgccttatctacttctcaggtgcgcctgtgcagatggatcaccagggaactgattgaagatgggttcggatgtgcagtgtctgtcacagagaacttgggacctacggccaagttcagtgtgtgttttgattcttccgtcttccttcaaaaagtcctttcactgggtgtccgggtgtcagctctccggtagtgtcacactggcataaattgtggtggggtttggttcctacggggcaaagaagttcatgagtgaaggggtggaggggaggagtttccaggcggtgaacacagtagcatcccctgagaaaaggaaaggcgtagttcgtgtagcatagcattatgcttctagtctgtcacagtcggggcattgctggagccagcactcaggtctccaagtgcctacctgcaaatgggcatatatttctcttccaagcatatgtgtgccaccaaggaagttgtccccagttatctgaagactggccttgcccttccctccctcctcttccctcttctccactccctctcttcctctggaagaaactcccttaaatcaggacatctgccatgccatgctcagccatgtcttcaccacatggctgaaatcgtccaaaactgtaaacccaaataaatcccccttcatgttgtcctcttaggtattttggtcacagtaatataaaaacagttaacagccctcccatagggcaaagagagtcatagggaaaaaaatgacaagggagctcacatcctgttggataggaaacagtaaagagcaataccgaaagagactagagcaacacattcaaggacacagtgggtgggcttcctccagctaggcctcaccacttcggaacagtgtgattgtgttatgagtacatcacggatcaggaacctgtcaatcatgtaagaaccctcaccgtctattgcccctggaaatgccctcgaagacacacccaaagctgtgcttcaccaatttcttaggcacctcttaatccaatcaagctgataaccaaaaataaccctcactgagttcttcaacaattcttttctccctctccattttccttccctccctcttactgccagtttcagggtacagtttggggaagccaaaagaagtctaaattattgagtttttataggggctacggagatccaagtgtggatgagagaagtggtacctgttcgttgttttataaccagtatgccaggtgtttcagatgtggtccttgggacaactctcagagaaatactagtcagtagatagtgactcacggtctgtgagcctgaatgaagggatttgtgtaagtcctaattaaccatggctgaagctatccttgctgcttgtggtctagaccactctcctagtccacatctctaccctaaaataaataaacaacaacaaaaaccttcctccccttctctgcctcacaccagacattcagtgagtgaagagggggagtgatgccttacctggactggttccggggcaggctctgtggcagccacataaatggttgtgcaggggtcctgatctgtcaggtcatcatcaagtttcttctctacaggctacaagagaagcagaggaaacagattagttgagcagaaagctgggtcgcattcaacttgccccacagaaaagcagctcaagttcaaaagctccttagttatttgctctaacttcctccctggagagaattctcccaaactttgctagccattcccagagtgacatcttggggcttgcaacctcccaaggcaacatcattccttatttgcactccagaaaagaaatgtttatctcaattgccatacatttcttagataccatagtttatagaaaaatttaattgaatgaaaaatgtctgattagggatgagaccggtgaggaggagatggaaacagtttattaatcaacttccattcattggtgtgccctttgcttcttctcctagttgggagaaatttagtgtgaccagacctaaatgcagggatgaagggtgggataaataacttatatgttctgcattcaattggggaattttacaaagaagagagttcttggaacaatgttgttgaatttccttttaagatttcttatcttaggtataaggaattactctaaacataatttaacaaggtagcacatttttgtttctcatgtcttcagttaggagcactgattctcacatctctagggataccacattggagcaacatcaggtgtataactgattttttgctactctttgtgaatggaagcccttgagataacagtataaggcaggaggcataagtcctggagtagttcctacaagataatcaacagttgtttaatttttatgttactatgttctgttttcacttttctgagacatggtctcactgtgtagccttggctggactggaactccttaaatagaccaagcttgcctcaaactcagagagacccacctgcctctaccttctgagtgctgggatttaaggtgtgcaacatgacacctggctgttattatactttatgtaaaggtattgtacagccattttgataaaaacaaaaaatgctaatttttgaataattatctgttatcatctttgtaatgatacagtagcatgataaacaaaaatgaaaggaattttgtaaggatataggtaagtctgtacatattgatatataaaacaataataatgtcatatatatttaaaatacacatgaatttaaaaaacagtaaaaatagaacataaatcaagattcaaaattatagtatatttaaagtattgtactagactataaagaaaaaaagggataaatgtgtgttaataagtcagggatatgctggatgatggtggcatatgcttttaattccagcatttgggagacaaagaagacaaatttctgtgattctgaggccaacctggtgtacacagctagttctaggacagccaaggctagaaaccctgtctcaaaaaccaaaataaaacaacaacaataaaaaccacaaaaacaacacaaaacagattaagaactcagggatgtatcttataatttctaggatatccactaaacacagagaaaatagttatttagaaactaatgaaatacagaataaagtggaatgataaaagtataaatttaaaaaaaaatcccccatcaaaggaactccaatctcagagacactgtcatctaaaagttctgccaaacatgtaaggtaagaaatatgatcaatcccacccaaacattttcagagagtcacagaaagaaaatgtgtctgttggtgagctgaattgtggctgccaaaagatacgtgccaccagagtcagggtgtgccattttgtggcattaaggcttaggcagaggcggagataagacagatagtcggaacattgaggagaggtcactgggtcagagtgggcccacatccagtgtgggatgctctaaggggtggaaggagcaggcagagacacaggcagcaatgtttcatggagatggaggcagaagttgtggtgcaaccacaaaccaacagatgttgaagtttggagccatcatatcacactgaggtaaaagcttctcccaagaaattcagagggtttgggctcctgccattatgtcactttcgttttggattattggtttccagaactgaagtaaactaaattctggttgcttaaaccaccaagtttgtaataatttgctatgacagtctgactgaaagaatacaagccttatcatttgtaaggttagcataatcatgatatcaaaacctcacagagttgttatgaggaaggacaggccagtttcacccagaaactaaatgtgtgtgtgtgtgtgtgtgtgtgtgtgtgtgtgtctgtgtctgtgtctgtgtgtatgtatgtgtgtatgtgtgtgagtgtgtgtgtgtgcatgtgtgtatgtgtgtattgtgtgtgtgtgtgtatgtgcgggtgtgtgagtgtgtgtgcatgtgtgtgtgtgtatgtttgtgtgtatgtgtgtgtgtgtgtgtgtgtctgtgtctgtgtgtatgtatgtgtgtatgtgtgtgagtgtgtgtgtgcatgtgtgtatgtgtgtatgtgtgtgtgtatgcttgtgtgtatgtgtgtgttttcttccagtgctggaactgaagccagggcttcatgcatttcatacatgttggcaagcactttatcactgagttatatctctagccccagacaatattctctctctctctctctctctctctctctctctctctctctctctctctgtctctctttacttttttgagacaggtaggtagccctgttggtttgaaactttttacatagtccaggctagccttggatttgctatcctcttgccactgtcttccaagtgctaggattacaggcatggacttccacgcctagcctgacaatgttttaaatgtatcttattttaaatatatatgtgttgggatgctgactgactgtgtggaggaccatgtacatgagagcaagggtccaccaaggccagcagagggtgtgtcaccccctggagctggtgttgcaggtcgatgtaagctcccagagtaggaactgaacccaagtcctccacaaaaacagtatacactcctaaccctggagtaatctcgaggccccgacaatacgtttaatgctgtaaaaagctcactagaaaaacttcagcaaaattcatgtttagtgatagtatatagtaaaggctttcctttcaaatctggagtttagggtaatgtcattgtcactacttctgttcagcagcgtgcacaaaactgcaaaacctcagccagcaaaatagggcaaagtaaagcgggtagagctatgtggtttataaacaaaaaagaaaaactaattctttggagatgatccagtggtgtaggttaaaaccgaagtcatctgcagacaaatgcgagaacttgtgaattaattcagcagtgctgcaaatacaaagtcaatataaaaattaatatgtcaatagtaagtaactagaaactaaaattttagaaaagggtaatgttgataatgttctaagatataaaagataaatcaacaaattagaatgatacagccatatttggaaaactatagaagatcatttagaaaaactaaataagacttaaaggataggcaaaattttaaaacaataaagatatttactgtcttcattgggctagtcagtgctaattaacattctagcaagattttagactatatatcagtacgctagagttagttaagaactttggatgaaaaagaacaaacggatgtaaaataattttctttctaataaaaaaattaaaaaaagaaagaaaaagaacaaacaggaagatgtattttaataagatatcacagtttatacctctaaccaagacagttcagccagtggacaatggaggagaatacaagacatcaaatggaaccagccatacacatgccctcaaattataatgaatagggcatagcagggaacagctcgtgcaacaaatgaccagtagaatatatccatgtgggaaaaaagtgaaacttggcctcttttacacaaaagtaaaaaatatttcccaagtgtgtaataaataaatgtgaaagaggatactagaagagtatttttattacccaggactgagaaacatttctcaaacaggttataaaaagtgataactgtaaaggaagaggttaccacattgttctagcctgacattaagaagtgttctttatcagcaggtcttgctgagaaattacaaagctaagccacacatgatatggatctaacctctaaagggctcacttctaaaactttttagtttataataatttgttaaaaaaaaaaaaggtctaaaactcaaacgtaaatgggcatgagatttgaatatgattttaatatggcaatgaacacaggaaaagttgttacttatcagaaaaacaaagccataataagaccccttactggtatggataaaacaaaagggctgatgggaacaaattttgactagcacgtacaactattaaaactcatttattggaaaagtaaattgataccaacttcaaagaacaatttggtcttatccagtcaattggagaatccatatactgtatcattcagccaatctacttctaggtatgtgccttacagaaatatgtatagacatattcatcagaagacattcatatgaatttcattactgtaattttcataataacctcaaaatggaaataaccagatgctgattagtagccaactggataaatatattccaaaacagcacacatggataaacaatgacaattgtatgtatcctgagttcaaagacatgtatgaatttatgatgagatataagaaaagatactgacagattctacttttatgaggtttaagaaaagaaatacataattcatatttctagaagccaggatagtggctatctctggggaggagttggagagttgtggtacagaggtgttcttggaggaactggccatgttctgttgcttcatgtggggggtgttttacgtggaagactcaaactgaaaggtgtaatttcttctcaaagtaggccaataggtctgatgcaatcctaactttttttttgattttgtaatacttgagaagctgattctaaaagacacactcagcctcagctaagtgaacatttaggtgagagggttatcataggggctctcatgtctttaaatgaaagtttgtttttaataggagtctatgatgattgtggtggtttgaaagaaaatggcacccatagggagtggtactattaagaggtatggctttgttggattaggtgtggccttgttggaggaaatgtgtccctgtagagtcagacttcgaggtctcatatatgctcaagccatgcccagtaagacagttcacttcctattgcctgtggatcaagattgaaactctcaactccttctcctgcaccatgtctgcctgcatgccatccgctataataatggactaaacctctgaacgataagctatctccaattaaaagttttcctttataaaagtttgctgtgtttttggtgtctcttcacagcaataaaaccctaagacaatgatgtaataaacccactagactaccgaaggcagcagaaagggatctgcccaggactgtttcctggtcctcagaaatgaatttattgtattcttaggcaattatctaattatcattaccttcataacctttactcaagactatgtctcccccaccatcctaaatagccaaatcatgggctaaaaaaatcccttagaatgactatgcatctgtctattgaggatcctgtagactcctgtctcttactgctaacatacctgtttcctgactccagcatgtctcatgttttcccatcactcccttcttagttcagtggtcatgttggctgttttgtttttctctcctctccctccattcagcatgtcaccttttgtttgaaccacactggaattctcaatgtcttccctttctccccctgattgttctgtgggtgtcttcacttggatcaggctggcatgccacacaatagctcttcccaatctccctctttccccaagcctgtacccttcaagacgggagtctggagacatgccgcacagactcctagaatgccagagctgggaagagtccactgttgtgtgttcatgacttcatctcattatgatgaagaagcagttgaggagaatgctcagtggtttccattatttcaaacaatatagaggaccagtgacacgggttcaacaatttttagggaagctcttattcttgatttctgcttccctaatttcatctactgtagaacccctgcagaaccatgatgtgtgcaaggtggcccagtccagaatcctgtgggaaatatgacagacacgccccaagaagagcataggacttaccccagatttctgtacttgggcataaattgtaaggctgttttcttccactggtggctggcaggtttttttacctgtaaagagacacagtggttatcttcctctagtcctcagcatgagcccccagctcagtcctgtctgacctttactctccactttctactcacttctttcatcaccaccactggaacgaggcactagttcccaaactctacgcatttgtttatagcattggattcgttacttgatatgtctagacctgtgtccccaatgccaaatggaatttgaaatgcctgtctcatagaactattgtagaaatcaaacgagataatacttgcaaagcattgacaccagttacactagcagatagcaaatgttcgatatgtgctgtgactcccagctctgggtgctatttaatcgctatgcagttcagttacttgaatctctatttttgtgcatgtctgctctcctaatagggttccaggttttctgagaccatagctgcctatttatagcacgcctcttattctccagctggtaacatgttgctccactcacagctctctcatctccctatttctggagggctcgctagtgtgtgtgggatggtgggataggtgggacgatgcacttggaagtctctggaaaagaatgcagcagcaccattctttccttcacaatctagaaatctagctcagagcctgaggtctctgtaaactaatgagttgtgaaacattttagtttttagctgacatttcaattttcctttttaaattataaagaaagtcctcatcacaaaagttgaaattggatagaaatacagaagagtataacttataacgccttctccctcattaacaaaccccatttcatttccagacgtaaccaatgaaaggagtttccagtatgtccatctctgggcaatatagtacttctgtgaaggcataaatgttcctttgcatagactaatagccacaggtggcaagcacttgaactgtgtgactagtgaaatcaagaaactgttactcaatagtagttcaattaaatactgggtggccatcttaaatatcggctatatttgataggtttttttcttttttacacaaatggttccattctactcacacatctctgtaacttgaccttgtcccttaaaatgcgttcagagactcttcatgatgccacagtggacctcttcacttttcctgacacggaaccacttccctggcatgcatcatgcgcgggtgaggttgtggaaagaaaggactgacctttgcaggactttcagaggactgttgcaagatctaagccgagaccatggaagctcaactcagcccagaagaaaccatagtcatcagggcaaacttgcctaatgtcaatccgtttatcctcctcagaagctggaagcacaccactgagaggatagctccgggaagtacacttgggtttggaagagaaatgcctggtcctgtgatgtgagtgtggggggagcgtcccactgagggtgtggctctcggcaggaaatgatgggaagttactgggaagttcaaggaattacagtgaaatttcctctgcgggtatggcatgcctgatggttctaatctcactggtgtgtgtgtgtgtgtgcgtgtgtgtgtgtgagagagagagagagagaggagagagagagagagagagagagagagagaaagagagagagagacagagagagagacagagagagacagagacagacacagagacagagagacacagagacagagagacagagagacagagacacaaagaaagatgaagagaaaaaattggaggttagggctcatatgttcatagcagcataaggaggtaggagaagggggccagggatttctctgagatactactctttcatttcaaatccactagtgttgcagagtgagacctgcttgcccagctctctcctgggtgcagcctggtaaccaaactgagactatactccagtctaagaacttttaaccctggaggccagatcaggatgaagtttagaatggcaggacagtcccaaataatcaaaagaccactgaatcaagataatttagattcctctctccctccctccctctttttcagtacagaatctccctccctcctctttttcagtacagaaacagattttcaggagccaactaagcttcgctccaagtcagccgagtctttagatgtaacgaaaaagatctgagccctagatcttagccttggagccagcattagcattgctgtgtggcactgaacagattatgtcatttcactgaggtaacttaaatgctgtagttgtaaaaccagagcataaaccttttgttttttagttctcacatgaagcaatatattgtctgatgtgaccctaactgcaagtactttaacctctgtaagtaccacttctagaatgtcccaggatagtcctctgtgggccttaagacttaaatattggcccacgcacattgagagatctatctgtttacagatgtatgtgtgtatatgcatgcatcatccaggaaaaccactgtgtgctatctgcgtattggcttgccaatctccacagcaataccacaaaagcataatatcctcactttgcagatggtgaaccatttgcttggttacacagctcattagtgccatagtctgcgtttggatgttgtctaaggccaaagctccacgtgttcatttgttaattttgggatggggtctcattaggtggctcagggctgatctagaacccatgggttagagtgatcctcctgcctcagacttgcaagcagctgttactacaagcttgtctcacggcacactgcccaatgcccacggtcataactagagtgttctcctggagacgaacttggcagaagcaccttaaatctcctcaagagtcgggcagcattctggagaagacacgctacgcattgccaacagaatctcttgagcaatgttttgtggagggtatagcaactaaatgtagattttggcataggtttgtatgacgatgggttacaaggtgtaaacggttcctggaaaagctggggatgtgttttgaaggcgggggaagtgggctttgctgggaagggaagtaatgctccctcggagctcagccatatgctgagcagaacgcagtgaggagtgtggtgtggaaggacagcatacctctactagctaggctaacgtgggagacttcatctgccttcttagccacagaatctcaatgttttcttacaagaaaaactaagcgggttcactcccagaccccttagctctcaacagaagttttgtctgaataacgagcccctcccccactgtctgggtgaactcttcgacggaggaaatgagacagaggtaggctcctgtgctgtgctcaacgtcttcttatataagcaaaaccgacatcaatgtgctgaggtaagggcttctctaagaagaccgcttgtagatcacactgacctgcttgagaatgacaggagctgacagattggtgatagatgaacataggtttccatgctccccaagggaaagccaacagggcatcagagacagggtgctctgatccagatgggtgagtgggagtcagtatggctgaggggacacatggccttgagatagcgaagaaagatcaaacatttaaatttggaatcacagccttactgcttttagtctaccctgggacatgattcacagatgcaagagttctctgaattctcttccctagaaaatctcagtagagtatgcctcctgtttcaattcctttagccttcggcagctctttcctctatggattccctgacagagtgagtccgtgtttatagtgaaagctacctgggcttgtataagatctatgctgtttagcacctggacttggtaagaagcctttcttgcaagacctaccttgttttttcagcatcatcactgccgtgggaatcaggatgatgactataatgacccctaatggtgcaacagtgtgtggtagccatgagcttgactctgaaagaaaagtcaaagaacaaatctcaaatgcactgtgggtttaaaaatacccaacccagaagtgagaaggctgagcctcatgccccatttccgtacctgactccccagggagacatttgtttacatggttttagagaccagccttagaccactaagatttccatgcccagcttcttaccctcatttcacttactatccccgactttcacgtttctaatttcataaagatgtttctaaatacaatgatttattttctctttaaataccgcttgtctaaaattaacttgtcttctctcccctaaggcaatcgcttgccctgcttctccatttttaaatttctaaagtattatgtgtccatttttggtaaaagggatgtgacagtcccatgtgcttgtccccatgcccccaaactactcccacgagacaactgggaggaagaaatctgcttgtcttcttaaaaaaataaacacaatagtgctattattgcctttgaatgcaaatgattgtgttgaacccacgagacccgaactaaaagaaaagcatgtcattgttcctgtcaattgtcattattttaaattatcgaagctaactgaggcttgaaatcatagagccaaattttgtagctttctctcctttagccattatgctgaatccctttgaaccgagaacacgactttggaaaagagtgaataaggcctttgtttcaatcaacaagacatatggctcactaacctgatagtggccagttgctaagtacttacagtccaatgcttttaatagtgaatcttgtacagaaatgtatttaatccaaataatcctaaggggtgggcacttttattttttccattttataagcaaggaaatgccatgaagaatatcaagaactagggctaggaataggagaggaaacatggctgagtactaaagtcaagctccttgggagtcagagagactcctggacttggagtgagcagtaaggtcccatttgaagcaccaggtttctaagtattaacgctaggttctagtgttactaatgaaacaaatacaataccgggtattagcagtaatgtgtagaacactttataaaaatgattctgagagaaaagtgggtttataaacatcttacccagcagtataaatatatacaaataagcaaacttcctgtttttttaacctttgaggggtatgtcagaagttgaaaggaagatctaagttacaatagaacagagtaattgtagacaccattcagatgcttacagaattgatgaaaatatagacagaagtcccacggaactgataaaaggccctagcccagcagtttccttctgaaagaattatcttcttcctaggctctccatatagccagccacaaggaatctcactgcaatgacagattctctttctcaagtacactatgttttaacccggccaaataccaacttcaacagttttgagccaaaaaggagaggacctaggtgtggtggttcatgcctccagtcccaccactcagaaggctgagataggagggcttaccgttcaagggcagcctgggctatgggggtgagaccctgccttgaaaatgaataaatgagtgaatgaacaaacacaggtaagcagagaattgtttttgtataactcataaaatgtgaaggcagctgtgagctactcactctgcatgacaccctgagtggtatacgatggctgagaaccctctgtgcatgtatgagcatgcatatatgtatgtatgtatgtatgtatgtatgaatgtatgtatgtatgtatgtatgcatgtgtgtgcatgtatgtctgactggttcagatctttgctgtcagtaccagggacacacagagagactccctggtacaaggagagaagcaggggcagcagcctgagcttcttcacaaactgtggtactggcccagcaaaccataatagtagcacttactattttgagagagttcctctttcttcttctaaagtctataacaaaagctaatttgagtcacaacacctcaaccatttatatcatttccaaagataatatttcttctaaatttcataagagatttacaaagagaccaaaaaccaaggcgatgatgcctctgaaactggaaaaccgatgacagactttcatgccaaagctgcctttctcctcttcccgggccttctgctgcagccctgctgcccacctactcacagaagtcaacaactacaggtacgtgattggggctccctgtgtgatgacaccaggcccgtgtcttcccaggatcccagcaggatgcaatcaacctgctgcctatatcctgtgacataaaagaccagcttctgccttatgagaggcaatccggccctcatcttgaaaggtatttctatcaactctaattttctccctgccttttaaaatatgtatgaatatattggcaaattaaaaaaaataaaaccattggcttaaaaaaaaaaagaccttaaaggaactatatatagtgtttagtttgcccactcattttaccttgaggaaacaagtatgtcagtggcacagctgggagggtgagaactgtagagtgccaggtttgtgacagcctctggagatgggagtcccatggggaaagtaggtagccacagactctgatgcctgggagagctaaggccaacccgtctcttcaccatcttccttccacaccctaccctgcctcttgatgctgcttcagcagtcccccacaccccctcaggctctatgctcagcccactcttccttcctcagtgccgcctttcctgaacattccagcctcactctgccctctcctcaagactttggcatcacatgtagtgtatgtcataaaggttagaacctgtgtttttccaccattatctttgcaatgcaaaccattttaacggatggtattagaaaacggatggatggattctcatgtactaactaataactacgtgtcttaaagagtcttttgcaccctctgaggcctgtttcatcatcaataaagtgaacataaaaatatctagtccacagagttgttctgatgaaccagcacaatactgcacataaagtgttcagagcatcatctagactccgtcacatgatcaacggacgccgcctgcttcccctggcctcagctcccagtgcacctgtaggaggccagagatcatctcttgacagagataccttttcagtcctttcagtatttgccacatacatcctcagtaagttcctaatggttgattggaacaagaaaatgaatttgctcctcactgaagtcctgaggtgcagagtcccatcctgtcatttacttatggcttagttttcccatctgactagcaggccccaaggtgcctatacttaatgttcacccacttggctctatttgtcaattatggtatttatatatagaaactaccaaacttgaaggcctgaggaattcagacaaatatggacacaatgctgcttatctagcttgtggggctcaggttacacacagtttccaaagtttctgggaatgttttccttgtggccctccaagctcttatttctcctgctctgcttgctcttctgtgtgctgtcttgtgcgaggatctgaagggaatcaaggagcagactctactgtgacatgggagcttccatccatcttctgataggtgcagacctctctctctctctctctctctctctctctctctctctctctctctctctggtttgttttgctttgttgaggggataggctggcctagaacctgctgtgtagccttgtgatcctcctgcctcagcttccccggtgctaggattagaggcttgtgcctgttccctcagctgctctgtttctgaataaacaccatcttccccttcctcagcatacaggctgcatctattctccttgggggaggggctcatcgtctgtcttctagcagctattaaagcatgtcttgagtactgtgcatccaccaaagaggaattttggtagtagcatctttaaaatgatgggtttttgttttccatctagtaaagtacacaagtcccacttaggttgacacctctaaagttggtctctgtgcccattctttttctgaacagccccccatcccatcagatacaggacatgaagtcactccaaatacatttgaatatgaattattgaatatgaatggatcttagagaactggcatgtcttcttttgttaaacgttatcagagtgctaaatatatgaaggtctcagaaggcatgctgggtcactttctgaatgccctgagacaggagtccaaggaagtaccaatggcctacttgtcatagctttgcaataacagtgagaagctggaaagagtgtgcttgcccgcagcacatcacccatgcacctatttccaaaccggaagatccctctgcttttgctcattcatgtagtgaggcctctcaggatgctggttctcagaaatcagataaaacttatccttggctccacaagtccttcagtcacaaagaaacattacctcaaccacttctctttctttccttttccttttcctttttctttttttttttcttttctgaaccagagttatgatgcttttctcccagctaagggggctgactgaaaacacctgtgctatttagaggagacagtacttcgcatgagtctccaccctgcagtccttcactattagctgtgagttaactgtaagaaaaactattaactgtaagaaaccctgcttagagccactcctccaaggaaaatgctggccgtcttctttccctttttgtctctgaaaactctgtcgtcacagcgacacaaaagcctctctcccttcaagtcctcagatcatgttatttgaagatgataaaaagaaaacaaaacagaacccaagaaataaatgtagttcatccaggagcctctgagatgctcacataacggtctgagagtaccggatctctttcctgcctttcatgtggttttgtcagcaaggttactggcatggagcagggctccttgagaagtcagaagtcttcaagagatgccttctcagtggtagtttccagtgagaattgggggtggggggaggataccaacttaagtctgggagcacccaagaaaaggttttcatggaattcacatcttctgaaaatgccaccttacagcagcctgtttcccacctgacagtgttgtagagggaacagcagcttgtttcccacccaacagtgtgaactagccatgtgcctggggtcatttcttccattctttcacgactgtggacacacaactgcccagctaataactgtatttcctagcttttcttgttaacacataatgaggctgtagctgatgagaggtatctgagctccattcttttgccatggttgccaagtttgctagatggggtgacactggagaggcccatgggcatggaacatctaggtgactgaaaatgacgggggtgggagggacactctggagctcaggtgttagccctttcttccactgagccagcattctactaacttcatgagaaagtttttccttttagtgtgggcttccaggggtattcccttctcactgaatttttaagattttgaatcaatcatcctcgcacagacacaatactttcaaaacatagtgattaaggacagcagcaagtcccacacaggatctactgtcaaaccacattaatgtgcttcacatgacctagataaaagatgttgtagagcccaagaatctaggccttgtcgtaagagacttcagtatgacggacattgaagatgtatgagattcttaaatggcattggaacccagaggattatgtgattgacagcctagacaaatgtcattaatgcttcttttcaaggaacaaatatgttcatgtacacattttcactaattaaagtggaaaaatgtcttcaaaatgactcttctgacttactgatggcaactctgatgaaccctcagcctaccatacagtttcattctgggactgaggtttcccttggtgcacactatgtaagaagtctttgttgcactaccagccgctgcattgacgcacatttttgatggattactgtcgtaatgtccttctgtaactagtttctttctcttctgcctcttgctgacccccgcctattctctacaccactgtactttctctttgagatgcaaagacaatggtgcccttctccatctaaaactgtcagcgcctatcacaccattaccttcgagatggtgtagaatgtggtgcaagccttctctgttttcctctccttaatatgccttttgccaggggagtctgggcggcttttgcacgttcctcaagtcaccatctttgatgaaccagtgctgttcattccctctctttattaccttgcacttattttggttttaaaacctctcctacatactctgtgatctaggataattgtccatttacagaattatcttcaggacaaagattgtatctctgtttttttcatctttgtgtgctcagtaccttgcatgatgctggaacgtggtaaaacctcaataaatgttttgtcaaagcaaacccagcacttttaaaattagcagcttccatttgcaaacacaaagtgacagaccagtggttcttaacctgtgacctcttcacaggggtcacctaagaccgtcggaaaacacagacatttacattacgattcagaacagtagcaaaattacagatatgaagaagcaacaaaaataattttatggtcgggggtcaccacagcatgaggaactgtattaaagggtcacagcgttaggaaagttgagaaccaccatgatagaccaatgaaagtggcttctcagtaatttaggtaatttcttcaacagccctgtgtagacgaaaggtcatgctgcacaatgccagggtgtctgccttggatttggcaaagaatgcctccatctttggagggggaggaacctttacttgaactatgagttaaattgtgttctcttaaaatctttatttggaggtccttaggatgcgacttccattggatatgggaaccttacaaagagaaccaagttaaaagtagggtgctatggcttaattactacaccgccaactcacatgttgaagctctaagcctcacaagagtgctgcttgggaacaagttgttatgaaggtaattaaattccaacaaggtcactagctgggcccttatctaacttgactgctgttcatatcaaaagcggggagcgggagaggcaccagggatgcagagacagaggaaaaaggccatctgtaagtcagggagaggtctcaggaaaaatcaaaccagacaacaccttgctcttgaactctagactccagaacattgagacaataattcccaacagcttaaagcatccagtttatgacatcaataccccagaaaactaagcctcctagcagcatttattaacagttcttgttgacatactcgtgaactaagtcatacatgtacctctggaaggaacattagtaatttaccctttgtcttgcagataggcagaggctcaagagaaaaggtggctgcttcatgtctagtagcgtttctgagtggatgaggtcttgacagagttctactcagagcgccttctactcaggggccacttagtgtccctccacaccccccagaagcctgcttcatactcaatcacactagtgtatacgtcatcctcaggatggcttaagcgggtaaaatcaccttcagtgttcgcttagaatgtcctgatctgaatgcccagtaaactttatggattaccaagattttattatgcactagttagatgcttgccaagctgtcttgaaaggagttcccatccccacttctcattttgagataggtcatggtaaaaatgtgcttccttgtctctaaacaggcttcatcaagcaaagagagctaggttgccacaatgggtcttgctcatctccaaggaaaacaactagtttttcattgtgatttctaaggacgtttaagtaaattcactcttctatgaatacctatgatcccagcaccagacagcccaattatctcactggctctgtgtttgatcttactcaaaccattcatagttcttcttttcttcatttcatccatagtgtgaagatgttgacactgtctacatcatttgatttctgtgagggttaatgatgtgccatgtagccagtacacagtgaacaaccaaagcctctcagccatcagttacagatgaagaataaagtctcagggaaagctgagttttttttttttttactcctgtaatcagaaagagccgccccgcgccccccccccatgttctagaagcttcccactagacagcactgttttctttctttctccaggatgccctgaatgactgtaggcagggagggacctggattatagcttacacatggcttgtgggccacattcagaaagtagagatggttgactctttccatgacatagttgcattaggttcataaaagagctcaaaggaatatgctggggtacagtagaggtatttcctatctgagaatcctctgggggtggggagtctcggttacaggaagtgctatgctgagggcataacgtatctacagtcccctttcctctgtccctgcacatctggtgtgttacacagacaccaagtctgtgtgggtgggagtctccttggaatggctcttgctcccttccccagctaggagatgtcaggatgtaagtaatgcctttcagggctctccctgaacattcctgtgacatagacacagtgtggcacaagagggcagtggtctcttctgtctcttggttagatgggcctacttgatcagcattctctcccaacagaacagttatgctctctatccaggaaaagagaagatctactcaaaatatttaggttgggcattagctccactatttgaaattcaagaaacttgagaaagatacttaaattccatgaacttcaagttcctcctatgtaaaatgaagctggtaatagcacccacctggcaaatttactgtgaaccaaagagacaatccattaaaagtgccttgccgataaaggagtgctggcatctcatcaccattcactggtttcacactccaggacttagcttacctctcactcggctcctctaactggctctgagactgacaatccattccaatgcacgcccttcccttacagcctgtgcttcattatcaagcaaacatttacactgtgtggccgaggtgcagagatcacacatcgtatgtactcctttctcttgcagcataagtgacagggaagtactttctgatggcatagaactgtctcaccataatggaacatggatttaggacttaggacctgccacctgcatcccttttccagacatcattgaatgctggatccagggcagaaggcacagagaaaggttttctcttggataccagagctctggctctaattctgtttgttctttccttccctatttgttccttaactgtgaaccaaatgttatataatgtcacctggagccaacatgaaagcacctttgttgaatatgcctagaggctttaatattataaagaaaacaagtgtcattggcaaggcttggctatggaaacagagctattgggccagttagtattgggcttgccattgatgaggtgccctagccaccaccagagtactcactggaggcctctcgcctgcactcctgccataggtcgaaggtccgggagtgactgctgacagggttgcttgcagtgcagttgtagatgctgtcatgatgctggttgctaagggtgatgtacaggaggtgggagcggttggctgggctcagcagacgggtgcccgcctcatcactccagctgtaagccacatgatcccctttcttcactgtgcaggctaacatcaagctgcaggtcccattctcagtctcctgggttttgtttagcactttaatctctggagtggagacctgctctgtcaggagaaagagaaggagccatcactgaaacacaactcctggaactattgactggtttatttgtcaaaacaaagtctagacgagtgttgctggagttttctttcctgccaggtcctgctgttgcttcagccacaaataaacacacggacgctatattagtcataaaactgttggccaatggctagggtttcttattggctagctctgtcttaataattaacccataactactaatctatgtatttctacatggccttatcttaccagaaaatgcctggtgtatcctatcttcttggtctctacatggtgtccctttgtggtctctctctgcctacctttcccagaattctccttatttcctagacctacctatcttcctgcctctgttggccaaacagtgttttattcatcaaccaataagagaagcatatatccagaatgacaccctccatcagacaagtggcattttcccctcactgaaaagtcttaagtgtgagttgtctcttgtgaaaaactgtcactcacatcattcctcacccctcttggttattcaaggactctcttgagatagaaaagagaagcatttggtttctagttcctttctgctaatactgttagggtactgtatgcatctcctgatgtacactatgtagattgttctgccatattctatcatgaataagacaggttttcattggcttaaagtacagcctcttagagctaaaagcatgagtttttagtggttggatttcattgagcctaagtggtgtgtgtgtgtgtgtgtgtgtgtgtgtgtgtgtgtgtgtgtgtattcaatgtgtgtatgtggtgtgtgtgaggtgttgtgtggtgtgtttgtgtatatggtgtgtatatgtgagtgtatgtggtgtgtgtatggtataggggtatgtgtgtgtgtggtgtgtgtatgtatgtatgtgtgtgtagcaagggctttgtgggtctaaggcagtggtaggttttcaatcacagccacaggccctatcaatccatacagttctaaagccatgagataggcaaggtaaaaagggaggttgtgcttattacagctactataggaccagcacattgctggcatttcatattcatcttctttaattctctcaataggtataactaaaaataattattcccattttgtggatgagaaaactgagtctcagagaaatggcatgtcttgtttgacattatacagcttctaagtggccaggctgaaataagtaccttcatcagattctgaaatcagccctccccttccccctctcgctaatgaaagtcatggctgcagagaacacagctcccaaagtacccaacttattatataaggtttgacaaagtcagaaaacttataagaacaaagggacagatcatatgacatgccttacacatgctgtgtggcctccatgcacactcagcagagaactatgggtattctgcattctctatttgcaggagggaaacactggggcaggagggagtcaagatgtttctgtttctctcctagataactgaatgtttcaacgaaatgctagctgtggacttcccatcccatccttggtggtgtaagagatccctttgaaagatcagggaagccccacagagatgccagcaagccttggaaagcagatgaggctctgggcctaggagataggaatgcaaggtgtcttcaaggacaggagcagaggttagagggactcagagagcactggagtcaggaagatgtaggttctacagtccctcaactaaacaactacataaccagatcctggttcaaatgagggggaaaaaaaggtgtttctttcaccatgtaggtggaagcctcccccagggctctgagcttggtgagctgcctgtgggtggaatgtcagctttctttactcagaacctctgcttcagcaaacagcctacacaaatgtgggtaagcacgtgcaaaactacttgcccctggagtcggggaccctggcaatgacagagaggataggcttgttcagttggattcaaacttcgtacttttgggcttgatagggaacaaaaagcttttattaaaaaattgatatgcagactaagcccgttagagatgaaagccagcccttcaggcccacacagtgggcttccttcctttcaaagcaggaatcaattcagcctccaccgatgggcagtttggaatataactaaccaactaatgtcagcctgtcaaagtttttcccttaagcttaaatactctctggaccagatcttttgagttgcttccaattgcagatactctgcttctgagaaaggcctaagtcttctaggcctcctgtgtgaaagaagtgtgaaaactcccatttttaccataaagtttcagttgcatgcagaattgctgaacggacacattctcctccaagctcacaaagtaccatccttcattctccctcctgtttgccaggatccccaggctcaggttttctggttggaactggtagccgtcctccaggtgatcaggatagccccctttagtgaggtcaaatgacactattttcttgttggttttgcttcctcgagacgttgccattgtgacaaggattcgaacacttttgttagcactcttatttatctgatttgtcagggacagccacgtgtcacttcccagtggctggataatcaccgagcagtccatcacacctctacctgtgggaagaaagggaagataattccttatgatgcaagaactggagaacagacagagaatgacaggcttgaggctcacctcttcttttgaacaatctcaaattaccaccttgtagtctacaaggactaccaccaggatcctaagcataacttcagtgtttcaaagcatccaatggaaatcctacaattacttcgccagggttctgtcaactcaggctgaacagaaggcagaagtaaatgacttccttaaagtcacgttagtaaggggcagagccaggactagagtctcagtctataatttctctgccaaggttcttgccaacactcagcatgcttggtaaagagtggataacagtaaaaaggagcccagggcatcgtagttcccaaagcactaagccaggtgacaggaagcaaagaagggtaggaggactgtggaaattagggaggtggtgcccttcatgtccaaactggaatcccagttcttcaaaaatatccaagataattaataatggtaaggttaagatattattttattttccttttcaaaaaaaaagctgaaccaacaagaacaaggtgggggggagggtgttaaaaaacccacaaaaccccaaaaacctttcaaaccactctaaggggttctagcgctgactatttaatacctcctcttggctcaaacccataagccgcctttctgcctcctcttgcagggggtgactgccctttttgtttcactgaaaaaatacagaagaaataaaaaagtaagattcaatctatggaaatcccagtcgatctgtctacctggaggaatgggctgtgctctctcccaaggctagcctctcccctcaaggaacactcacaggctttcaggtttcctctttaagccatcccctgtgttctcattgtcttctggatttctttcaccagcccatacatacaaacacttaattgcccctgtcttaaaaacaaagcaaaaacaaaaaacaaaacaaatctctcctctgatcccaggtccgtcctcagccacttggccattttcatcttctttctggaaggttcttgcatgtctgtttatgttttctgcttttacttcctgacccagtttcccctgtgcccattccaaagaagtattctgccccaaattctcattgcatcacacttgtccatatctctctgttacacagagccaagtcagttaattctccatcattatcttgagtgtttctcaaggaacacccgatagacgtagctcatcatccctcctttaaacactctgcatttggtccctgagatactacacttccctgacttgctattttgttctttttatcattcttagtttccttgggggaaacttttgttttcttcagataatctgaatatcagactatgcctcggctcaggcttccttctcttccttattttcacctattcagtttctcatttagctgcacagtttgacatatctctgcagtatttacagttgtatcttatggctattcctttccctgcctcgtcctctactgcctgcaaagatatgcatgtggaggtttaaacggcagctgactttagcaaagagctttctgttcaaacgtgaatattcgtccagtttctcaggccagaacattggagcatccctcagtctgtcgttacactccgcatttgatcctgatagaaagccctgctggctctaatttccacctaggtctgacacagacgcacttcccatgccatgcctgctaccccaacaccacaggcctagctgctaccactgtcttccagctaaccccccagtatttgtaccacggaaagagaaattctttaaacccatgtctgatttattttttttccattgcttttggtcctccagggcttttcaagcactcacaaagttcacagtccttgactctgctcaccacaacccgggcattgctccaaatccatccctgctcactttctggttttcacagcactatggccaggtagctttctgctccttaatctcatcaagaacattccagtctctgggtcttggcatgctctgtttctctctggaaatctcttcccttttgtacccgagcggctcagttcctcactttattttaggtcccctctcagagaactctttcttctgagaggcctcctctgacggagcatccgggatagcccctgcccattgctcttgctgtcactgcctggtgttatagtgcacattcattcattttattgctgcctgccccacttaatacagtcttctccagagaagactgtattcacaccactgtttatgcctgacaacctgatacagtgtttggtacagagacactctgaaataaatacctgttcaattgacaagtgccgaaagccatattttaccttgacagacctcttagttagcttagcctaatatgtatataactgaatttaaccataagttaatgctcattataggaacacatgactcaatgagcatagatggttctagacgataagagattcaaaagagtaaaatgaaaacacctgcttctgtgacgggcctacctagaagagaccccttctcaactgtgctaaagttgagctcctggaaaactgagtaaactggttaaaatattcttgacatcagtgtgccctgaaatccctacactgtctactaaatggcccagcccaaattaattaaaggctagtgatgcagagaaaaaagaagatgcagtctacatgagtaaaagtcaggatgagtgtgcttgatgcatgggtgttacaggaaagtgaggtagatgacaaggaagttggtctttggggcattgctagtgtttcctcttgaaacagggtgctctctccccgtttctcagttagatgaagactcttattttactgtggctgtttggcactattttgacatgggtgcactgggaagcacattggactttctcccagccatactcagggatgcctgacaattccagatggcacagctcttctgatggcttcacacctgaactgtacaaatggtacctcttgagtcctaaatataggtaaaggaaagagggaagactgagagccacacaaggacctctaaatgtatgcacagtttgggggaatacttctctaaatgccatttctgaaagaggtatgagattttaaaaacagaatcagtaccatactattgacattttaaactaattttgatatggagaaggggaaaatggggaaatttacccagcctaagactgttgttaactcctcactctccaaatgcctccgatataacctttcctgccacatggcctggtaggtttttttttgttttgttttgttttttgtattttcagagtacaggattggtacaaggaagagaaaagcagggtaaggccgcagtgggaagtagccaagtaaacaaattaataaaccatagaaggtgagaggagaaaagacgaaaggaaagaaatgggcagacacagacaagacttcgtggtttgcgagcacaaggagtagaaccaaaacttcaccaggaggagaccctcaggcccaaatacacacagaatgatgatgtaatttctcccatgactgtcgagtctagaggggagcttgaggtcatcgccaccccagcacaagtggaaacacaagtggagctgtaaaacccttcacatagagtctctgttcctgaaacatcctactgcctgatgagggttttccagtgagcctgtgattcaatcagccctgtttactagaagacgtcaggaggaaacatttgagctctgcacaccaactcactttcctccaggggtaattctactttgatggtggagtgattcacataggcaggtgaacaggggcctgaaatctgcaggacttagctaacccattcacaaggcgggattctaccctagaactttatttttggctttatgctgatatgttataaatggttttagcattttactatatttttttgcagggggtgggggggtgggggggaggggagtagaaacgtgacaggtttcacaggcttcacagttctagttgtaaatgcagactcaggaaggaaaaaatatcttatctaaggtttgtttttaaacctagatgtcagttaaatatccctgtcccatggtgctgagagtgttgggcctttgctgctcaggctatttatctgtacccatcatttctcagagtaaaatcctgggtcaccttttgcctagtcaattccttccaccctccaggtcttcaccttgacttctctttatgagggaagaattcctagactcagggctttcctgtcacacacttccatcttactttgcatcactcctttataactagctttctctagtttagcacttgtcatcctcacacagaagctttcaagaagagggattcattgtggtattctaagaggtacctgggacacatgggaacccaggaaacccttgttgtcaaagtggatgaataaaaggaattgaatgaatgaattaattagtgaataaatgacaagatgtgtctaagttctcttttcacaaccaaaatgaattacattttatctctgtatcatccctatgtgggatgagagacagtatgtgtccccactttccaggtgaggatttagaagttcctccgtcataaacccttggtttttggctacaatggaccctttgccattccccccaagcacttacatcactttagctctgtatttgtatgtccatctaaaatactctttcccaaccctcatagaatccaacctctatcttgaaagacacacgaaaactggcagcagtgttgtcagcagcaaggatcatagggagaaggatcttcattctgctctcatttgttctgtggaagtttcagagacacacatgcaactgcatctctcttccaataaacaaaaagattaaaacaaaaatctgtatgctaaaaaagttcctatatattttctaaacttccctttgtacacactttctacattctcctataatttatcaattcctttcacctttgaagttttctatatttcaattagtattgattcaattcaaggtcctcatgggaccttgatacactgtatcattcttcccaatttctcaatcagaagcttatccagtttcattcactggcaagtctagagtgtacaaagactgttgatctactctgcttattttcctcatttacaaagttgttatagtactgacggtgatgataacctcgtagggttggtgtgataaatgataaacacttcgaataatgtcttgtttaaagcaaatatataggattttctatgattgtttattcaacaatgatttttcaatgactctcacatgccagacactatgtcaggtgatcatcagagacaatgattgccccttttgctccctacccttacaccttgcccggccacatcagacgcactcagtagatcagtgctgaatgcaatctttgaaggtcagtctataaatgaccaaatccctgatgctttgaactctattccaatgctgcagatagagaaaggtgaggttttatatcatgggattaatttttttttgaagaagaagaatctagatcaatacattggcatagaatgggccagtagctgcattaggttgggtcaagtctagaacccttatctgttactcaacatgcatgaaagatgtgggaaggacccacatggaagaataaagcacctcatttttggagagtcatcaatcctaactcatatatccctgtagtggccaatactgatgatgaggtcatgcaaataccgggtaaggggatgcgagctgtctccactcaacatggatatggacccaaaattgctctacaaataaagtctagtttaaaagattactgatacattgaaggatctgagccaattgatttctagacatgatgttacaacatgtttggtctttggtgtggatttttcagaatgtaaacttatcattttatatctaattcaagtgctcatggaaacattaggcacaagttatgtgaaagtatcagtgaattggagttaatggtctatgtagatgaagaccgtaatgttctggcataaatgatgagggggacagccatatcggaggccaacaaaaatgatattattacacaattggatcaataattggatacacaattattgtatccaatgaattgaagaaacttgaggctgactttgtaggaaccccagcctgagctgtatccattgtaaagactataaggcttcctgagggcctaataaatatgaacattgtgacataagcacaatatatctgtcttctctaagggcaagaaattaaagatgactcccagtaaaatatagaagaaaaaggcataaaagtttacctgcagttattaacccaaagggtagtaactctttactatggctctcggatttaagtcaagacactatatagaagtcgtgtcaaataaccttgtggcattcaatataaataaatcaattgtcatttaggagaatttcttttactctggcagggactctttgctttttgcagatctgactgggaactgaaaattgagctgggatggaaaggtgctgatttttacaagaattgagcttcttgactgggttgcccagacacgactgatctgcctcatttgcaaggcacttctatttgagttttattggggttttacaaaagagtacacatttaaaaatagaagcctgacaaaaattgaaccaattttagaaggtgtaatgcaaggaaaggacggttgctaagtgctgtgttctggggctgggctgtcactcaccaacaagtgacctctcacccttcagcagaacatttgttagctacacctgagcttccacagagaaaaacaaaaaatcatcctatagctattagtcaccaagtgttccagcaatggtgggattcagacaagatacagtgaggaaggccatgctctacctaagaagatgtttggttaggcaatctaagctctcaaagtggggctaaacaaaggccgccccatctgagacttgaacaagagattccatttatagcacccctccatccctggcacattcctgggcttttcttagaaaagtccaaaatggatttgcagttatgaaaaccccaagaccaaagctctctagccctcaggatttccccatccccttcctaaagccatctctatgccagctgtctctcccacaatctcatcaaatcctaaaatggagttgcccgttccactcacatggtcagcacggtatccccacttagcatggttgctctcaaatacctttccttatagcactgacccactgcgcagaaaacaatagcctgccttggaaagaagcatcagcgggatgggagagaagtctggctttaactttgctaccagtcgggcccactacaggagcttctttgaccttaaatttctccatttgcatttcccacattctataaccagccgggctccaaaactcccaacctctccccttcttgctgcttcggaatcatctcttataagaacgtgtgaccacagtgaagccaccgtctgttgtcagccaaagggctgaggtttctcacttctacctgtttttcctctaccacctttgctctacaccggaccatgctcgttgtctgctggtgcatgtgtgagagtcactttccacagcaaggattcaggacaagtcttccagagctctgttccacagcatgggtcattgctagaagggtacccaccccaaaccaaccactcagaatttcagccagagtccattacaccaagaggctgattacggatgtagcgggtgcctttggcttctggtttccttagaaaccagtgtccatggagctaatccctggaacccgaggttcaaggaacatattattttcttcctctttgaaagacacagtagaaacccagaggcactccttcaggaagaagcaactgaaccacacaccccatcctgtgccccctatatccccaaagctctgattccaaactgctgaacacaggactcaaacccttaaacaaatggacactcaccggttccgtagctcaattcaaaagccagagaaagaaacagaagcatgcccaaggaaagggacctgttgggatccattagccagtgaagagagggccgcggttcctggctgggagccggccagctgctcacagttgccctggcagaggctctcatcagatagtgctgcctctgcgttcaagtttacacatcaggaaccaccgagttcctgaaccagcttcctgtctcaactgggtttttttttgttttttttttttttttctctctgcttgagtctcaaggattgctcatatctgatcaggcttaaatcacttcgttgttcttgagaagcttaagtcaggtgtctagacccatgggatccaggaaaggacctgtgtagtcacttcagtcaaactctggtttgaggcagaaacatgctccctccccaccctcctttttctaagctgcttccaggaaatggtgtcacagttctctgagcaggtctgtctggtaactattcttgtgtcctaaggaaagacagactctggacagaccacctccaaatgaggtcattcagagctcaggttctgtaactaaacttcagttagttacagagataatagtcttatttcttacttgttccacgatctcactgaacacctctgtaagacagatccagagcttcagtcacagactgatggggtgggcaagagtggaccactgaccaacagcccatttccctgacagacacagtgtggcaggatcaagctagttctgtgctgccttcaatttagagcctgtgtgtaagttttctctatagaaaggacttactgtgggaaaagaacactagaaaatgctatgatcagggctcacaaggagattttgaaagatgaggctaggtgtctgtgtgtgtgtgtgtgtgtgtgtgtgtgtgtgtgtgtgtgtgtgtgcgtgcctgccacggttgtgcatgtggatgtcaaagaacaacccttgggtgtcagttttctcctcccatcatgtgggctccagttactaaactgaatttgctaggcctgtatagcaagtgcccttttcccctgagccatcttgttggtccccagactaatgcttttagaattcgttgtcataatcagagacgctctactcttggcctccccaaaggccagagggtagaaagagctggggacagaggaaaactagtctttttcctttttgctttccctttccatctttcagtatacaacttcatagtggtgagttgggtatggtactttcccagctctacactcagcatcatcaccctgggaactagatatctgcagcgtgtggaattaataccatggaaattggcaaacgatataaatcagagtttccttccttcccttccttccttctttgtttcctttcttttccctttgtttttcattttgttttggtttttgagacagggtctcactacgtagttctggctgacctagaactcactgcatagactggtctggtctcaaactcacctagttctgtttcccagtcattaaatcagttttcaaaaataatgtaggtcctagagtcatacagctaccagacaaaaagctccactcagtgtgcttctgccaagctccgccctctcttccaaacgcttacttcatccttccaaaatgaaccatctccttaaaaaattttttttcattagttctttgaaaatttaaattcttatcatatttatgcccccattcttccaaggacattcacctaactttgtgtcctttcttttcataaaaaccgctttgtgctacccaaataatcttggatgtgcggtcttccactggagcacatactatactctcagagaaaattgtccctccctctttcagaagctgatgaccattaatacgtccatgctagcagtggggttttgtgccccactctcatctctaagctgagactgagtttgcacaggttctgtgtatgatgttacaattcctaggagttcctatgtgcagctgccctctgggtcttgaagacagtttccttgtagttgtctaccacctctggctcttacatgctttcctgatgtttttaacaaaaatctcaattgtttgattctactaataaaaacttgggagacaggtgctgggatcaaagcttgcttccccagagaaacagggaaagcatggagctaacctgactcttcaagtgctggcccggaagcttcctaacatctaccaccatctcaaaactgaatgtccctcccttgtgcttcttgagcgtctctctttccatcccaaccccctcttactctctgtggtggttttttcttaataatcttatgttcaccctctgtcaactggttgcttactccacctcttgacctatcgttgactttatttaatcctgtttacaatattcaaacccttgtattaaaggcgaaatgttgaggctgagccataccacaactagagacaggttttgccattaaacaacacaatcttggggttcacagtgttctcaaatatcctgcaacactctctgcccccactcttgggaggaagggggtgcagtagagatgttccatttacagatgagtattttacaatctcttattctctggaccttgaccagttgtaggatctctgtgttagccacccactacaaataaagtttcctctgataacagttgagattaaataagaatgactcccataggctcaaatgtttgaatgcttaatcatctaggagtggcactacttgagagggattatgaggtgtggtcttattggaggaagtgtgtcactgggggtgggctttgaggtttcaaaactccaagccaggccaaatagctttttcttccttgtgcctgtggatccaaatgtagaattctcaactccttttccagcatcacatctaccagcatgccgctactcttcctgccatgctgataatgaactaaacatctaaacctaaaagcaagctccaattaagtgctttcccgtgagagttgtcatcgtcatagtgtcttttcacagtaataggacatagactaagacaagggttgagaagtgcattaatctataggtataatgataagtttagaattaaccctcttctagtctcaccttgaggcatttctacttcatgccatgttgtgtggtattcaccaaagaagactgctcagacatattaagccaatagaaagtattagttaactgctggctatacttcgtgtttaagatcccaggttagcactgagcctttctcagggtgagcttttaagcaaaaacaaaaacaaataataaaaacaaaaaccaacaaaaaaccccacaaaacaaaacaagccaggcgttggtggtgcatgactttaatccccgtactcaggaggcagaggcaggcagatctctgtgagttcgaggccagcctggtctccagagcgagtgccaggataggctccaaagctacacagagaaaccctgtctcaaaaaacaaaacaaaacaaaacaaaacaaaacaaaacaaaaagcatgttctgggttgacatacttagaatagttagctagaactggaactccagaagcagcaagcaaggtttctacgtttagagacttttccagaattgtggactacagtggattaggtctttgttttcaattttggaaggtggtattgtctccttgctgagctgtatggcctgaatggtactttcctcatggagtcagctgtactaaggcctggagtcctgttacagcctcatgattctctcgtcagagagacatcaaggtaattcagggttttagtctgaaatggttgattatttaggacaatatttaaagtccatcaatgtacactgactcagacatgtaggtgaatggaatagtgtctcaagtcaaattcttgcttccttggaatatcagaatatgaccttatgtggaatagggatttttaatgtaacataaaatcccagctcagttagagtggtccataaatttaatgagagtttcttcagaagagagaaaaaaatacaccagaaatgtcaaaccaagatagcagggattggatttatgcaactatatccaaggaacataagagaacctcagacgctgggagagatgaggcagggtctctcagagaacctttaaggaggcctggacctcttgatgccttagtttcagacatttttgttctctgaaactgtgacagaatggattcttgttgtttcagcttcccatcttgtgctacaagagacacaaggagctaatgtggatttaggttatgtggtagctcgaataaaactggcctccatagggagtggcattgtttgaaaggattaggacctgtggtcttgtaggaataggtgtgtcattgggggtggactttgaggtttgagaagctcaagccaggcccggtggctcactctgtcttcttgctgcctgcggatctggaagaactcttgacttctccagaaacatgtctgcaactgtgagttctaccatgatgataatggactaaacctctgaacccgtaatcccgtcctaattaaatgttttcctttataatagttgccatggtcatggtgtctcttcatagcaatagaaaccctaattaagataggcaatgtcttcacagcaatagaacactgaccaagacaggcaatgtggtgaatcagaccaatgtggaaagacacacggggcaccttgcattcacacagccattgctgtggggccaacacatttactatgttatcctcacagcagtcctgggagcagacagagctagtgggagtctagagctggatctagaccaaatttgagcattcagactctgggtaaaaggtgttttctctttttctggagtacacttattattccctgaagactccagaaggtggaaaggaagaaaatgccactaacccctgtaggcccggggtttccatgtgatattccataaatctctgaaacagtgaaaagaaggtttaatttccctgttttacagatggaggtctaagagttgctgcacacacatgcacacagagagaaatatatatagagagaaatccttgattgcctaactctacatctatgctttctctattcactatactatgtctagtagagtatgctaggcaagaacgtttgtcaatctttgggctcatggtggtcaataacttattatctataaaatatgtcttccagtgtgatcagagggagaatcctggtttcctgttcctagcctccatcttctgtggcaaggcatcacttccttttggctacagaatgcctcaccctgagagcaaggaggactgtacagagaacagcttctcctgtacttcaatgaggtcatctccaattctttatttttaattagtgtgtgtgtgtgtgtgtgtgtgtgtgtgtgtgtgtgtgtgtgtgttgtgcatgcatgtgtgtgaaggtgtgctcacacattcatatacaagggagtccagaaatccatgtcaaaggctctgagatctgtttgtctctgtcccctgctcctgccctgaggtgactggcccactgcacctggcttttatgcagctgtcagagatccaaactcaggctctcaagcttgcatgacaaactctttattgtctgagccatcgtcccaatcccaacatctaactctggaatgcaaagatatttgtcttctaagatttgttacccatctctctctaccttgggagttcatggctaccagtggcagagttgcctgcctgccagtacctggggctgatgcctctgaccatcttggtttcccagccaatgaccatcttcaacataacttctaactaaaagtcctctattgcacaagatatcctggcagcaaagtcactgaggggtggccaggtcacctagcctgatgaagtttatgatgagtacatttatctgggtaagagaaaaaaaccccacaaaaacaaaatgaaagtgcaaaattcccccaaattctgagcatctcctaggagacctaattgcagagcctggggaaaacactgggaaaaaatacccctgtgcctactctgatgggtaagatgaggaagctcttgagggatggaggtaaagacgcaggtatctgatacaatggctgaggggatcagccgacagaaagcttcttgttgggctgtgtgtgtgtgtgtgtgtgtgtgtgtgtgtgtgtgtgtgtgtgtgtgtgtgtgtgtgtgtgcatttgtctatgtctctctgtctctctctctttctctgtgtgtgtcgggggaggggagtgggacccagggggttgtgataaaaagagagctggtaaaaaactggatgagaggagctctgctcagatccaggcctaggcgctacctagcccttatctcatcctggggactgagatttccctctccaacctccttgtcacgtagtctttcacgagggaacctcccccagagcttcagaatcagttcagagcaatgacacctggggactgagagatactgtggacttcctctccaaacattttactttttcactgatgctcctgccatcagaccccaaagccaatgtggtgtggacagtctcccctctggggactaacctggacttgctggcctttccctgttcatcaaagagtccttcactgagtgccactgtgtgacagactcccccccacggcacttttggaatcgttcttgttagagttacagtgcttcctacaactcattaccacacagttttctggtctgcttgttactggcaacagtccttagagaaagggaaatgcctatgtcatgttagtccttctaggaaaaaacagcattcaggaaccagagacagtggatgctgagtcaccagcctcagatcatttctgaactcccaaaactgcctccacacacccttttagtccaagtggtggtcatagtgtcaactggtgatagtttcaaagtactctagaaacctggataactactgatgcctttgttcttccctctacacatatttctaacttctgttgaacatagggagatagattttatggattgtgtgtttaaaattccaattataaagaattcaaagttttctaaaagatcatcatatttctttaagaaaaataacagaacagaacaggaacagaaaagcatataaaatcctagctgaaaatgaaagcagaatgaaagtatggatttaattttttggccctacttggttcaacttcacaaaattcacatagggagggatttgaagttaacgccaaaatcacaagagtaaaaactgcaaggatagtttaattgtgaaacacatataagattcttttctgtggaatgtgtttgttcacttcaacttatcctcttgcagtactgtaaattttcaagtcaataaatgactctgagtattgtatatgagaagtgaagtaagaaaactgaaatgctgttccataatatggttaaaggcaaggtttttattgtagttaaagagaaaatacccagagcaaagactttttttttaaagcagagaacatgagatagcaagacagagagagagacagagacgcagagaaagaaagagagagagaggaagagagagagagagagagagacagagagagacagagagagaagtgagaatagcagtgacaaggggaaaaatcttgacgttgtaaagagaacaaatgcgatatctgggagaagggaagcctgaggctgccagcatgaactttgaaacatgtaacaaatacttgtgggtaggaactgagggagcctggagaccagcatggactttgatatgtagccacaggtatatcttaatggagaataagttccttctgccagaggtgagggagatgactcttcttggcagatgagaactagtttcacaagttcctgaggaatgctggcttttttctaaccaccagaaaacttcctataatccaggttgagctgagactagactcaattttgggcggaatcagtggggctccctttttgagtgggaggggataccttttggatgtgacatgtatcattacaattagatgtctggtaggttattctatcattaaataatatttatagtcaagattccagtgctagggcaaaaggctttgcaagaattaccctttactgaacagtatttgaggggaggggtacctcactgtactactccttccagaaacacatttgtgtcagggccaaaggaaacttccaagctcccctccctaaacttcctccagcttccctcctcccagctacgcaccttccttataaccctgctattcccactgtgttctttctgttctgctcctgcttctcttaatatgtttcctctctattctgtatgtcctgatattctctcctctctcacagatagccctggccatgtcaagtctactactttctctctcttttctggactcttccagatacctctagctgctttctctttctctctctcttgttacgttaaatctttcggccaaaagctgcccgagccccacagccacgtgggtggtctctgccagctgcccgagttctgcccgcctcatggatggacaaaataatacagagacatattagatacaaagcatgcagacaactacgaattaggagcacagggacttcgatgagctagggtaagtcacaatgctggtgagactgctttcttacctataaaatggtgcccatgttagctcatgtagtggattgctacttagaaccccactctagaccaaagcaattgtgccccaatgctgtgaatcttagtgactgacagttatcagctgagttcttctccagggatgccttcacagttctttactgagatcaacctgtatctagaaactagtcagttggtggataaaaaaaaaagtctagtcctctcaatttggagcagacatgtagaagtgaactgaagcctttaccgtgactgaatccaaaatcccacttctgctcaggccttccttcttgccttacaggcagtgattggtttttccagaaatcattcaataaacttcctgtaaactgtcacatggggacaaatggtattaacataccaaagctcacatgggcctcaggctgtctcagtacctgatacagagttcaagatgctaatatcttgtctcttctcaaccttttctcatccacacccactaccccaaacctctccagcccaggtgtttcccttccctcagtttctcattcatatacagccctaagatagctcaatagtttggaggatagaggtattaaaccaatagtgtaaaatatacattatttcactgctagtttccttgtctccctttttgatggaggccttcccatggcaagcagtatcttttttctcactccagatcaaaactttcttctgtttacaaatagttcaacatattcttaataaaaatccattcattccttggtgggagccaccaaaaatgtttagcagattagtgccttgttcatattgttgcataaggtgaaagtttcagcaccagatgtataaactgacagcatgactgcccacaaggtatggttaagtggaaggtttttagtgtagatatgagggagagaacagaggcatctggaagagtccagaggagagagagagaaggtaatagattgtacatggccagcagattgggtatggccaggaggagagagagagagaagaagagagtgagagaggaagacaaagagagaaaaggaccaagagagaagagagagagagagagagagagagagagagagagagagacagagacagagacagagagacagacagagacagagagagagagagagagagagagagagagagagagagagagagagagagagagagagagaaaatagcagggctataaggaaaagtgagtagataaagcggagggaagttcctgagccagagaagcagggaaggagtcaagaagagttaagtacttgagctacagtaggagcctggaggccagcatgttctttgatgtgctaataggcaccactggctagccactagtcccttctgccagtgagaaggaaatggctcctttgttagaggggaacaagcttcctgaggaatgctagcttttgtctagctaccggaatctcagagattagagtttcctttggatctgactttgctttagagaaattactttggtcacagtgttagagatttacatagaactaaaatctgggagaaataatggtttacagttatctacactggaagaattaatgacctaacttaaaaagtggccattggatgggagaagctgttcacaagagagttgtttagtatgtagacttggcagttgtatacaagagagcacagaaaagaaactggaagcatgaccactccatgacatggttaaggcaaaagcttttattgtgtataagagggagaaaatatccagaggcatctagaagaggccagagcagagacagaatgaagtagaatgaatatgaccatcagattggacatggccaaggctatctatgagagagggaagaagagttgggtattgagaatagtgagagagtcaggagaaaaacatagagaaaagtgagaatagcagggttataagaagactgagtagctttggggagtgaaaggccaggagactggtgttggagctttgaaaaatataacaaatacttgtgagtagtgactgggggagcctggaagccaacatggatcttgatattctaatagatgctacaggtatatgttaattgaaaagccttctgccccttttgccagaggtaagggagtgattcctttaggcagaggggaaccagcttcacaggttcctgaggaatgctggctttcatctaaccaccagaaaccctcctaccctccaggttgagctagctcatttttggatatttgaactgcctcctagagtttggggaactggagattcctttggatccgaaaagaggagttgttgtctctttggatgttggacatgaaggacaataacctgaatactgtgacctttagatgtgaggtttagtctcctggcaaatgatgatgcctttctctgagaaaggaagcacagaaatagagaaaagtttggggcaaaattgggagcaaggagtacaaggttagttgttagtttgaggtacgtttagttgaagtatttacagtttatctagatggaaatttctagcaaacatttgaatatatagactgactttaagaggagaataataatctagaagcaaacccccgatacaactatcttagaattcactttttttttttagccctcccacttcactctcaaaaaactaagatttagaagctaacacctttaagggacttaccatgaggtccattttttgcaaagacctgaccagaaaccgtatctcttgggtttaagccagtgtacttagctcctggttaagttcctttttctctctctccttttttctacttatcttcatgctcccccaatgtaacaatgtctgacatagaatattgctgaatgtgtttgttaacttaatacaataattatacctattatttagggcataagattggtcccttatataaacagcatcactggaattatattttagaggcattttggaagtcatcagacccagggaaatccaatttagccacggaatttgcattttacctctctccacttcctctaagagcaatgtctctgttgttcaggtcacagccatgggaaggctttgtgctaaaccctttgatgggattgggaagattgatcaaagcaaaaatactaaaaggagtgatttggggtgcagaaccatgcaatcaattctgtcttatttttcacttggaggaacttgagctaagagctcttgtcttgattgagtcacattagagtcctgacccaggaagaaagtagcagtctgggacagaagaaggagctgtactagttaagcacttactgaaggctggaccttgtattgcatgatttagtggtgttttcccacttaatatccacaaaaagatcatccacatgttttccacatgaggaaagcttatttccctagagttttacaattggtcaatggcagttttggaacataaaccccgaattgtctgactccagagctcatgccttatcttctgtgtcatagagtctatggtatacaacttactagaggtttctagtactaatccaagcatcaggtataagcctggaaaccaaaatgcctattctgacactttctctggaagccagtgaacttgccaatcttgacatccttccaagccctgtaaagttctgggatataagagagtccaggatattcttgtgactcaggggatgcccagtgggtgtcagtggaaggggatttgaccttcacctctagcccgagctctgtcagtaactagtctaatggccttggataagccgccacttcactgttacagttttccaagactgaagaaaatacagataaatgtaaattttgtgggcttccctactgatttccaagccttgtcttcagtagttatctttgtcacaaagttggtagaaaaagccgatttattggggagtgagtctctgtctcctaagaaatgtttcttggctttgaagaatgattgctttgaatcttaacaaatgagtaagagtttatcagatcagtgatgaggaggaggggattttaggaggcacaaaagcttgaacaaaggcacccgtaagttctaaggaatcacaaatacaacaaagttgcagcatttggtgaaagggagggtctaaactagaaatgagagaggagaaatccacagaaaccaagtcatgcaaggagccgtcagattgggctctctaaatagcttatgtctcaaggtttcaagcatgacagtgtggtcaggaaacttgtgcttaaggtccttctgctgtgttctggctctttgccggagatggcaagagagcagctcccactctttagaagggaaagagatggggcagaaccgccacaccagtttcctggctttgtccatttgctacgtgtggtggttaatcttgactgccaatttggagtcaactgatcctctgagccaatatctgaggcatttccaggaagaaaaaatatgaaagaaaaaaccccttctctcgaatggatgggaccttccagtggtggttcaaagtctgacaaaaaaatcctggtgcatgctggcttttctggcatcacttcttgagcatctactctcctaattgccacaccatcctccacgaatacctgactccagcttcttcagccttccagtgtaggcagaagacggggacaatccagaaatcttctaggacttcagtaacagatcgggactgctgaagagtccattcatgggctgagcaggtagctactgggttctcagcctctgcagcatgcagatagccattgttgaacatcccagtccccatttttaagccaccccatgatatgtacacattccagacaatgctgctagcatactactcttggatgctttgttccatttccctcttctcccctttctctcctgttccagcccccaacttcctctccccacagaggaagaacctccctatgttatccaggtggcctgtgcctgtaattcttttgcctgcaccccctgaacagctaagagcacagactcatgccaccacgcccagactttgcttgactgaatcaacggaagactaatctgtcatctcctcgttgatggtttaatgggtgttcaattgaaaatgattatttgtcctgaaagagtctataagaagagagtcctataagagtaaagaagaggacactgtagatgtcaacacagcctcattttaaaggtccatcggtgagagatgatcaaggcagaaatgatctttctaccttttgacttaaacataatgtcaaacttggagaatattaagagagatatatagagaacacacttacaccaagacatggtgacacacgcatgtaatcccagcacttaggaggtaaagataggaggatcagaagttcaaggccagtttctgctacagtaaatccaaagctaattggagctacataagatgtgatttcaacacaccattttaaataacaacaaaaaccaatcgacaacaaaaattcacctttataacctatctgcaaatctgagttggctgtaactgaatacccgttctttaatgctttactccattttaattttctctgtatgtatgtgttatataatatgcatgtatgtggatatgtatgtatttatacatatacaaacatatacatataattactttttcctttgctatggcaaaacacttgacaaaagctacttaagaaggacttatttgggcttacagtttaagggtacagtccatcatattgggacaggccaggtggcaggagtgactcggctatggaagccgcagcatgaaggagttggttatattgtatccacagtcaggaggcagagagagaggcatactgatgctgcattcaccgtctctatctggtttagtccaggatccagaccacgggatgatgctgtcccctttcaggctaggtcttccttcttcagttaggcttttctggtaaatccctcacagacacagtggtttgtctcctaagcaattctaaacaccatggtgttgataatcaagattgaacattgcaaggcttgtgtatattttcccctaaaatattggactttgtgtgtatctcggccctttgtctataactttggtgtgaagactcaggatagcccctaagttgaaagaggaaaaccaggcagtttcaagctggtaagggcgtgcattttagtagtggaataggctgcagctctcctccggacactctagatgcttccatgcttgcaccagtcacactggcacatttagtccatgttgtttttctctttgccagctgtctccccccacccacccccgaagctaatctttaggggctttgtttgtgtaaggtctcctagactcattctttgccctattctcctgtttcaaactgttacacttacatgcctgaaagaattcaagcatgcacaagcaagtgtgctcaacagccaagaagagtagaacatttgccagtttattctctctcccctctttctcagaaaagtgtcacaatagaattcccttctattgatgaaaagttatcaaccaatgttaactttcttaatctgggagttaattacaaaagtgtaatcatcttacttttcggcacaaaatgttacagacttcgaaaacaccaagaggccacagtcacaatttaaatgtaattcactgaactttgatttttaagctacagctgtcctgggttcccatggttggatttggcaccaaggcccagctaccaggggatgagggcttttagagtcagttcaatcacaattacttcatgcctgtggaatctgaagctgcttgtggagctgcctcactcgcccctgcacacagcgataagaggagttttcagaaaccagggcaggtggttaatcatttcataatggtttttaccatcctggggagggggcaaggagtcagagttgctaggagatggtcttttaggaatttagaatgggtgcctagcacaaaatggacttttccgtagccatcacaatatataatatttcaataaagagtgataatgatagagaagctgatttatgggtttacctttgacatcatctcttgctcttggctgggaatagtctgaagaaatacttgcccactggagcatgtggctctggcaggccttgcccttctctcccattccctctgccttactaaaaatcattagattacatccccaaagctagccaccaaggtctattcccttaataggccacttcctcctcctgagtcggctaccaaggtccagctatcaaagtatggaagtccaggaatcaaaagtcccccttggctcacctaattaacatgcccaattaaaattaaacaccttatctgggcgttggtggcgcatgcctttaatcccagcactcaggaggcagaggcaggcagatctctgtgagttcaagaccagcctggtctacagagcgagttccaggacagcctcgaaagccacagagaaaccttatctcaaaaaaaaaaaaaaaattaaacacctcatcctaacacggggtttcctctataaggggtttcccccttgttcctttgtaaaccaccattttcctatgtgccgcgtctgtctcccctctatccaaaggcagtttttcatcctccaggacaaatgccccctctcccttgctgcctttcccttcttcctcatcctttatctcctgtcatcctttgtctcttaacccctgccctctgtccctctagggcaagcaaatctcctttgttctgagaacttggccttgggggtcctgagctgatacttctcctttcatgttcttcactgtccatttagtgctcagtcctgttattgacctcacaactctaataaggaaaatatagcagttttgaggcaagactgatcacaggtttggtacccagggtgagatatgattgatcattggcgaaccacctcttggaaataagaatggctcagtcatcacttaagagtgttcagaagactaactttttggcttctggcattaaccgtgtatgaggagaccccaaaggaacttgcatctggacgttgagagaggcttccattgtaagagaccttctccacaaccaataggtgatgggggaggtccttctgtgtatatgtttgtcgtattgggcgataaataaagtaatgttggccaatagggaaacaagataggtggggctagaagtcgaggaggattctgggaaatgtagtaagatcccagcaagagaggatgcatgtcgctggtgtccttggtaagataagtctttataaaaatacatagattaacggttatggttgatacttaggacagagctagcaaatgagaaatcctagtcattggctagcagcattgtaactaacataagactctgtatgtagtttgggggccctagagtggcggcagggctcaggaggatggcggaaggagttattgttacaaataggtgattgcttatggaagatggagagaaatcattgctgtaaacctagggctcctaatagtgtcctggaggcagtggcctttaggaaggaccttcgtgggatttttctggcaccacagtctgaaattgataatgtatatgccctattagcttgtttattggcaaatcttgtgtagtagtttgaaagtaattgaccccataaactcataaggagtggcactactaggcagtgtggctttgtttgaggaggtgtggccttgttggaagaagtgtgtcactgtggggtaggctttgaggtctcctatgctcaagctactcccagtgagacagaccacttcctgttgcctgcaagtcaaggtgtattagctctcagctcctgctccagcaccatgtttgcctgcatgccaccatgtctcagcatgataatggactaaacctctgaaaatataagacacccaattaaattttttcctttataagagttgccatggtcatgtttattttcacagcaacagaaaccctaaccaagacatcctatctatgctatcatttgttccagaaaaactgtataatttccttctttatactcttgacagaaggttctctatgccagggcttttcctcttgacccctttctaattttaggagtggagatgaagcgatgtcactgagggtgaagtcatctctctggtgctgccctttgagaaagtcaccaatctccttatgctggaggggagaaagcaggccttcattcaaatgaacacagaggaggctgccaacactatggtcaactactatacgtcagtggcacccatgctgcgtggacagcccatctacatccagttcttcaaccacaaggagctcaaaactgatagctcacccaaccaggcatgtgcccaagctgtgaactctgtgcagtctggaaacctggcctcggcagcctatgccactgccatggatgcagggatggcaatgtcaggccagagcccggtgctcagagtcattatagaaaacctcttctacccagtggccctggatgttctgcaccagatcttctctaagtttggcacagtcctaaagatcatcacattcaccaagaataaccggttctaggcactgctgcagtatgctgacgctgtgagcacccaacatgcctggctgtcgctggatggccagaacatctacaacgcctgctccaggttgcgcattgacttctccaagtcttaagctcactagtcttaatgtcaaatacaacaaagacaagagcagagattacagttgccctgacttgccctctggggatagccagccttcgctggaccagaccatggttgcagcctttggcctctctgctccaaaagtccatggagcattgccccccccaccccctgccataccttctgctgctgcattgccattccaggcctggcaggcaccagaaattctgtccttctggtcagtaacctgaaccctgagagagtcacaagccaaagcctctttattctcttcagagtctgtggtgatgttcagtgggttaccctcaaatgaattggtacaggagaccactttctgaacataacaccagtagcacaaacattgagatcaacaattaataaatgggacctcctgaaactgagaagcttctgtaaggcaaaggacacagtcagcaagacaaaacgccagcccacagagtggaaaaagatattcaccaaccccacatctgacagagggctgatcaccaaaatatacaaagaactcaagaagctattctccaaaacaccaaacaaggcaattaaaagttggagtgcagaactaaatagagaattctcaacagaggaatccaaaatgctaaaagacacttaagaaagtgctcaacatccttagccatcagggaaatgcagctcaaaaccactctgagataccattttactcctgtcagagattaataataccaatgccaatctatgctggaggggatgtggagaaagaggaactctcctccattgctggtgggagtgcaaacttgtacaaccactttggaaatcagtatggtggtttctcaggaaaatgggaatctactgcaaaatccagcaattcctctcttgggcatatacccaaagaatgcacattcatacaacaaggacatctgttcaactatgttcatagcagcattatttgtaataaccagaacctgtaagcaacctagaaggtcctcaactgaagaatggatagagaaaatgtggtacatttacacaatggagtactactcagtggaaaaaaaaaacaatggaatcttgaaattcgcaggcaaatggatggaactagatgaaaccatcctgagtgaggtaacccagtcacaaaaagataaacatggtctgtactcactcatttttgatttttagacatagagcaaaggattgccagtctacaatccacactgccagaggagctaggaagcaaggaggaccccaagagaagattgcatacatgattgcaggacatgaacccctgacacaggggggggagaggaaggaggtgggaaggggagaaggggagggggaggagaacaggaggactgggacaggggaggaatagaggaggaaaagaaaggagatgtcttgatagagggagacagtacaggtatggagagaggtctggcacaggggaaatgttcacagggatgaccccaactaagaagccaggcagtggtggagaaaaagccattggtgcccttcccctataatgagactggtgtctaccttggttaccattcctagagccttcatccagtagctgttcgaagcagaaacaggcacccacagctaagcactgaaccatactactggaatccagttgtggagaaggaggagggatgagcaaaggagccaagaccgggctggagcaacaggcagaaacagtggacctgacctagtgagagcacggagaccctagtcataaatcttaggaaacagcattggaccaaaccaagccctcttgaatgtgggtgccagctaggaggccaagacagtctatgggacctctaacagtggagccagtgtttatccctagagcacaaatgggctttgggagcccattccctatggagggatactattgcagcccagatacaggaaggagggcctgggccctcccccaaataatatgaaggactttgaaggtccctggtggagggcctcactatccctggggaagttggggggtagcttgcggggagggattggtggggaacatgggaggttggaagggcaagggaatgggggggatggatatataaataggagtagtaattaaagaattaaaaaaaaaagattctgttcaacaagaaagaaaatgcacttgtccagatggcggatatcagccaggcccagctggccattagccacctgaatgggcacaagctatatgggaagtcagtgagcatcacactgtgaaagcatcagagtgtgcagttgcctcgtgagggacaggaggaccagggcctgaccaaggactatgatagctcaccactgcatctcttcagaagccgggctccaagaacttccagaacatcttcctgccctcagctactctccacctctccgatatctgccctctgtgtcagaagacaacctcaagaaccacttctccagcaacggtggtgtggtcaaaggcttcaagttcttccagaaggacggaaagatggccctgatccagatgggctctgtggaagaggcggtgcgggcgctgattgaactgcacgaccatgacctgggcagaaccaccacctgcgtgtgtcctccatgtccaccatctaggtgcctacggacctgcgacagcttccaccattccagaaaagcagctgaagtgacctaacagaccagagattttagttttttaaagagatcagtttacctgttctttaaaaaattaaatcccgtccaccttgccatggcaggaaatgacttgggccacagtggtccactcaggccaggcactatgccttgagcggctcaggcataataaggccacagcgatgccccgaacacagccgctttctcacaccctacaaaaccagcccaccttgtggctgtgcacctagcttcttaggccaccagtcttgtctctagagctgcaaatgagccagtggcctgcaccacaggctccctatgctatgcagtaactggggtcactgccctcacccttataatcaagtgacatgattctctcatgtccctagccagcctggggggctcaggccatcctcagttgccgagcctcatgtgttctattctatgcagtcgcagacacccatgcctagcaatatttccacttgaccaaatacctgaatctttccccattcatatgcaagagatacagttttaagtaactttttatagcaatgatacaatggtatgtgtgtactctcagcttgtatgtccctgtgcttgtcccctcccttcccggtgaccaacttgcaggtggcacccaggccagtgctgcctctgcctggagaaaaacagctctgagatcagtgggttcctaccttcaaattttagaccaaagttttgttttctgccctcctctgactaggtccaggtgaggggctgacctctaggccttaatgcccctcccaaatgctcatatcatgcctagcctatctgtgggaggggttccctggaccttgcctctgtgaaagactggcaagagtgtaaacatttattatttttatacttgtgtggagctgaggaggtacagccgttttttatggtgacagatgtatattttggaaacaactacaggctcagtattgtcccggggccacccagtcccggatggtgttttgggggggagttcccattaaagcagttttctaacctgtgccttccctgagctcttcattctgagctgtagaggtatcagttgggctgggcccggactcaatgaacaaacagctgtgtcttggcaaaaaccaaaaaaccaaaccaaaacaaaaccaaaaaaaaacaaaaaacaaaaacaaacaaacaaaagttacacatttgaaaacaaatttttgagaaagaattctaaatagaagggaaatactttggtggtgagaaagtagtgcatatgctaaaataaggggttttaattatttaaataattatttaattatttaattttgtatttgagtattgtatcatttccacgtctcttcacccctcccatctcctccctagtctcttcccctccctctcaaattcatgacttattctttagtcattgttgttacattatgtgtgtataacatgtatatttgtatacacaatatgtatatataaatacaacctgctgagctcatagtggctacacagcaagttcaaagtcagactgggataaataggaaaaccctgtatcaagaatcaactttaaaacaaaaatattttatctgttttaacattttctttacatcatcacttagtaattttggttaaataaatatctactatttgaggttatttatcttattatatatacatagacatctgcaattagagattcatgcacctgagggcttaatagcctgtggatctgagctttgtctaaatgttatgtagaaacctgtagaattagaagtgtactataataggtctttgtcaattttctttgactcactagccccaaaataatgatacagagacttcttattaattatggaagcttgctgacctgaacgtcggggaactcttgctacccagactgatagctgggataccagcatggagctcatccagaccccaggaacatgggtttcagtgaggtaaacctcagaaatctatggtacctgctgtagtagttcagtatttatccctagcataggtgtggactttgggagcccattctacatagaggaatactccctgagccaacacacatggaggagggcctaggccctatcccaaaggatacaatagactctgatgacaccctatggaaggcctcaccagccagggggagcagaaaggatatgtgataggtagggttttagttggggggtggtggtaagggaggacgggagggacaagggaactgggattgtcatgtaaaacaatcttgtttctaattcaaataaaaaaaattaaaaaattatggaagcttgccctttagcttgttcccaactagctcttataacttaagttaacctgtttctattaatctacatgctgtcacatggcttctacctctctcccattctgtgcatctgactcagcagctagagacatcccctcttcccctctctgtcaggaagtcctgcctaacctctcctgtctagccaaggctggtcagcttcttattaaaccaatcacagtgatacatcttcacacagtgtgaacaaatatcccaccacagtgtacagtgtacagggttaatgcaagcaaagcaaagcagtgttgttttttatacaatatacattgtatctatctataccttaaatacataaaaccattcttgaaagtcctttcacatttctgtcattgtaattgatacaattaaagaaaaaaaaagaaagaatcccatcatcttgtcagtcttgtgatttaaaaccggatctgaaaggacctgggttcaatttccagcacccacatagcagctcacaactgtctgtaactataagagctgacatcctcacacagacaacatgcaggtgaaacattcatgcacataatgttaaaaaataaaatataataaagaattaaagcctgtatctaattaaaacctgtgtttaattgaaataatttaagtctgtatctgtttgtattagctaaataagcacttccagattgtataagaaaactagctgagcatgagccacagaattagccagaaagtagcaaatgctagaattgccagtgcctattaccatgcctgcccagttttaaggtagtgctgtagagagaataaagggctttgtgcatgctggcaagtacttgttaagtttcttctgggattcaaacattccatcctacaggaagataaacaactcagaatagctctaggaagtcactgaaactgaccaaattcacctggaccctccctgccagaataagctgtaaaagctgggagtatcgctcagaggaatggagccaagaagcagaacaagactcagacaagctcacttcgttagggtttctatttcccacaacaaaacaccatgaccaaaatgcaagttggggaggaaagtgtttatttggcttatacttccagatcatggtctgtcattggaggaagtcagaacaggaactcaagcggggctgaaacctggagcaggagttgatgcagaagccatggaggggtgctgctttctggcttgctttccatggtttgcttagtctgcttttttatagaagccaggaccaccagcccagagatggctccactcacaatgggctgggccctgccccattgatcactagatgagaaaataccttgcagctggctctcatggaggcattttctccatggcttcttcctccctagtgactctagcctgggtcagactgataaaaaaaaaaaaaaaaaaaaaaaaaagcagccagtacacaagacaagctgcaaagaagactcttgacgtcagatcatccacctgcaagaaacaacctaaatgagtttcctggaagagttctaaagaccacctgaggcacctgaaaaggacagtctccaatcagttgagctgcctgcagggtgtgcagtgtgtttcatgttcccagctttgatgagctgtcccccatgctggggtggacttcagtgacgcaactctctttgagtcctttctgttcctacaagtaacccattcctgtaagtcataccaagttggactttggtggtgtctgtactttggtctgttatgggatccctatctgggtgaatagacatgagtattgcatctccttagggaaagttttgtcactcaacagtactcttccaacagagctacactcccaggctttctctgtcatgagaggaacactgtgtggactggctgcctcacccttttaccattaattacagctacggatgctcttgccaccattactctctcaccatgaaactctaatcaaagtgcacctttcctccattaattccatcaggtatttttgtacagcagtgggagagcatctaggaggcagggcaccccttgcgtcatcttctttccttttccttgaagtctcctcctcacacagtccctgacctgcccatcacccatcacctttcatttttcagtctctagtttcaaaggaaggctctctctgactttaaagtcagattcaagccttgattccctgttgtcaatcctcagcgcttgtctgtatagaagtcgtcaaattcgtcatgtgcagctgttgtcataatagaacttaagttagtgatgttcctcgtggctatctctctctctctctctctctctctctctctctctctctctctctctctctctctctgtgtgtgtgtgtgtgtgtgtgtgtgtgtgtgtgtgtgtgtgtgtgttaaatgtagaaggaagtgcaactcatagcagatgctcagtaaatatatctaccggcatttttgaacaactgaattattgaatttggctggttggaagttaagatgagagggccttttgttttccaggcacaggtggaccctgccacatctgcacccattgtttaaggatgtttggggcaaatccctcagtttcacttttgttatttccagtaatttaacagttcaatgtaaaactcccctgtgcctcttcccgtcacttctgtttaagcttacctcatgttctaatatctgtaacagggaagagggtgtgatttggtctccccccacccatctcctttacctcatcgtcttgaagcttctcacatgacatggggcaagaggtgagggccagaccatttttagttatctgccgtggatgctagtctcaatctctctacacagtacagtccctctgtggctgctccccgtggcagacatctatcattagctcgttcgcagagtgtctgtgatgaaggagcagaaacacagctcccttctgtggtcctcaacacctaagaagttcccttaatcttttttggaccttgattcgggccatgctaggacccatggcttcaatgaagaaaggaatttcagaactagccaggatgaagcagaattggatatttttcttaaaggttttttaatagaaaagctcccaagaagataataaaagctcacccaagggcagggatgtagacttctcaaagaagaattgctgaaagtaagagagtctcaaatgtggcaatgcgttccccaagggggagaaacatagtttattgtcttagtctgggccatatttatcatcttggtgactctcaagttagatcactaaaggttgttaagaaatcttttcctccttctttctccctctcatttttcccatttttaattatttttaattactcatatttacatatccacccccccattccctcgccctcccatcctcccatgttcccccctcaacccttccctcaccccccactcctctccagggatagtgaagccctctaccaaggacctacaaagtctgtcatattgtttgggggaaggtctagaccctccttgctgtatctgggctacaatagtatccctccatatggaatgggctcccaaagtccatttgtgctctactccctctcatttttattttgtttttattgttgttttttgagacaagagttgttctgtgtagcagccctggctgtcctggaactcactttgtagaccaagctggccttgaactcacagagatcctcctgccactgcctcaagtgatgtatcaaaggcttgtgccaccacacccaatgttctctttttttttttttttttttaagaagtgagattgtagggtggcctggatgggccctagatgggattgtaactggataaagtaaaatctggaggcactggagttgcacatgggatacaggacacgccttttccttataaatggggcttctgttgagattcctggaatgtagggttttggaaatctgcagtgggagagtgttgtccagtggttgttaattgtgctgggattcttgcttctctgccagcaagaggcttcaccctaattcctgacagaggtgttcctctctcctctcatgtcacagttctccctggacatttatccagcctcactgagcacaggtgagatgtcttagcctctttgggcctcccttattcagcccccactgatgttatactcgatatccccttaggcttgtatctgcctacctcatggcaaaggtagtaaaacaaccaaagcctggctatcaggaagcaagacgttactctccctttcattggtgtgcctggcggctcttggaagtgcctttcatttggcattgcatgaggaggatttcacccgggggaaggggaagtcacacagctctctgattccaaaatacaataatttcaaccccaagaattcccttcctctctctctagtcctgtttatactgagtaggggtgaagagtaatgtcataggagaaccaggtcagccacccctttgtaggtcctagacttgaccctgtcccctttacttagcaactctccttagaatgtgaagtctgttggtcctggtcccagagaagcagcattaagaacaaacaccagctaagagaaacaaccagtgtgttttatgcgttgtctgtaccttggggagccttagcccaagctgggctctaggtctcaaggatcgtcagtctggaaggcacttgttaaaaagaccgaatctcctgtttcatcagggaggaaagaaaccgaccaaggcagcactagcaggggctgtgaagaccctctgagcatctcttgagattgtgtcataaatgctaaatcccagagcctacctcagaactactggcccatgttgggagaacagaggtccttgtgctcacagataagcaccagggaaaccaggaatattaaacacacagagttgtctcttcaaaggaagagatgtatagccagtgtcctgcccagaaggctgggaatggaggtgatgaatagcatgggtgacctctgtgctatctgtagggccaagccacttgtggctctctgcactcccctcctccagctcccataagcatgacagaggtagctaatagtcaaggtgacttttgtgatatctgtatgactaggggctccaccaggtttctgctaacaggaccaggagtgtcctctgctctatctgcatgactgagaacacaccaaatcctcccccaaacccctaaaataacacgttgtctatctatagaacccatcccccatgaaagcagtgatatctactttgtaatacttttgatgtaattataccttaacgtgcacatgggattggtttacaccgggaaatttttttccaaattgtactgtacttaaacatgcctacaataaattgtccagtgtcagactctagtagtttaaacaaacataggctactgagtcatgttgaactggatttctttcttgtctcatgcagactgttactctgccagccctggtgtctgcagggacccctacaaatccagactcggcatcatcagcaagatcagtgagtgatcctttgagaagcatgggtccctccccaggtctttacatcatttacaaaagcttgccgcaagggagccatcagagggcagtatttcagagcttattggagcctggtgaggcgtcttggtaaagatttggggctaatactgatctgtagctgcttgaattcactgaaggtaaacctgctgtgtggcttgggtgttgctttggagtactgagaatggcagccagggcgtcacatctgctgggggaaatgctccaccaccaccagcctactcttccagcctaatctactaagtgttttgttttctttttccaattaccttggagtttatttaaactaagaaaagggttataatgttttcatgccacatatacttggttctttaaataatagttgagacaaacaacagaaagaaataaagaacactgtacttggggtctggagagatgcctcggtagtaagaccacttgctgctcttgcagaggactctgcttcgttttgcagaattcacatggtggttcatagctatctctaacttataaccccagtcctaggggatgtgacaagcttttctgatctctgagggcaccaggcattcatgtgttgcacacacatgtatacatgcaagcaaaacaggcatgcatataaaaagttttaattgtttaaatgtcacactttaacgaagcacttttttaataacccagaaaaacatcaatattttgggttgtaacaactaaagaagcacctcatttttcaaaatactgttatagttaatacataggggcatgcctttatgtggctggccccaggaatgcaatttagaaaagacaaagagttacactggaatgactcaatttctttaaaatcactgagcaagaaaagcagcattgaacttccatgttgattttatactacctctctgagctgccttgactaaaaccaagagcaaagttaggatgtccctcctctatttttggtaaatagccaccgcatggtaaactcttgggttttacctgggactggccttttgatattttatttaaaggttctgtactttgatattgtatcatcaatggtaatgtttcttagcgtctcgggaagagccttattctttacaacaatgcagcacaggctagagtccctgctaaggccgcctcaggttgttccagtttattttgtgcatcagttttatggccgtctcatttatgttggtttccagcatcattctgccatcactatttctgcaagaataccataaaccttactacatggaatactcagtctagttcacctgtgttttcaagcatccagttagatctgaaatgccaagcacatttgctgaggaatccacacagaaaacaaatacagtgttgcataaaatttataaatcaatttgtttttaggtcttctaatgaatacatgatagctttactttgcatttttatgggactcctgagtgtgtgaatgagtgtgtctgtgattcttgggcctgctcttggggctcttttccttctgttgggttgacttgtccaaattcgatgtgatggtttttattttaagattttatttatttattatgtatacaacattctgcttccatgtatatatctgcatgtcagaagagggcaccagatctcataatggatggttgtgagccactatgtggttgctgggaattaaactcaggacctttggaagagcagttggtgctcttaacctatgagccatttctccagcccctgatgtcatggtttttactttggcttattatattttattttgttgtgttttattcttacctcttagaagtggtgacaaactggaaaaattagagtgaggggaaactaattaagaaaagaatcaattaaaaaaaggaagaaagaaaaaacaacattaacataatatagtcacatattttagtgaaaataatgaatttatctttaatgtatgtttgaaaaaatagtgtatgtaaaattagatattaacaacaacttttaaaagattactataaaatttttgtaaagggatgggcacacaggtcagtggcacagcagttttgtagcatgctcaaggccctggacttaaccctaggatgatgagaaaatgcaaaccctcacaaatgaacaacacaatttcttctgtgccattgagccagagctgctttcctgggtaggagcactgctagtgataaaggcagggtcctgtggccttgaagtttcattcttgagtgagaagagtccatctcaggtcagcaggacggtatgaatgatggataccatggctactagccaagttgcaatccaaaagactccagaggatctggctaaaagaagaaaaccgaaaacacttagaccttgttcactgtgttgagaaggaagggaggactgggcatagggatgactctcttaaaacaggagagtcacttcctccctgaacctaatcccagatgcctagggaaatcctcctcctcctcggaaaaaactcaacctctttggatgtaaagactttggaaattccttaaatttcattggcttggctgaatcctatgatggacacttactttgatatattagtaggaccaggaaagaaccaaccccatacacctgagagcaacaagataggctaagccagctgtagatagggaccttgaaatgtgcaccactgacattagggacagagggactgcttctccttgtttgtctacctcaatgatcatttgcactaactaggaggaaaggggggggtgacaggaaagaaaggaaaactgatcacaatgaaggaaagagaaggagaggtgctatcataggaaagggagtgagtgataaaaatgagaagagaaattggagcgttttctaggaaatcttgactggaggagttggttttatttttctctgtggtcactcccacttttaaagaaacagaattacccctttccctttttccaggtctcagagtgttgtattgctaggaaaatggtcagcctacttatgctgtcattaccccgtgtctatcacacaggatctgtagtgagagatcactttaggagagaatgaaaagacaagatcagtcagctgacatgagaacatggagactcacagcccatgtgcagaaacagaggcaaagaaaccagcccagaagaccaagccctgaaaaacacaaaatagcaatgtctccaggacccaggatctctggtgataggatttgtggaagttgctatagccagagactgggtccatgtagttcagtcttccatctttaataatccaattaaagagacaatgtaatagtgaaagcatagtggggggctattacataaaactacattgggaagcaggacaaagagatccaataacatcccactacaatgtctatactcaggttttaacatgaagttcaggtttaaatagaaggcaagaggtgtgtataagtaagctgtctcaaagtacggtcccacatgttattatcctggttgtaatctctcctgcaggatgttctgacaagttgtcataagtgtgtgaaatctcttccctggagacaagtccttcctctggctggtgcctggctttatatcctttttgcctcctgccaatattgaactcctggagaaattctaatttcttagggtctgttttagtcagtgatctattgcagtgaagacacaccctatccatggcaattcttataagagaaagcattttaactggggcttgcttacagtttcagaggtttagttcattaccagcatagcaggaagcatggtcaaattaaagcagccatggtgctggagaaggaggtaagaaggctatatctggcctagagagagcccttagacctggattgagtatttgaaacccaaagcccatgcccagtggcatgcttcctccaataaggctgtagttcctgtaacaaggccacacctcctaatccctgtcaattagtgctactctctagtgagcaagcatccaaatatatgagcctgtggtctgtctctttagaaaacaaaccagaataaaacaaacaaaaaaagaataaagaaaaagcatgagaagcatacataggcagacacataacgtcagaaaccacaatatataagtaaaagaacactaaaggtaaaaacaaaaaaaatctcccaaaataccattgaattaatttcctattggctatcttctgctgggcacgggcctgccctctactgtggtttgtatactcagtgaggctccatcagagaaaatcaattttttctttacaagcagttgacatttggagatagattctgggttagggatgggagctcatgtccacttccccctctcagtgctgggaccccatttggcttggacttgtgcaggccttatacatactatcaaagtctctatgagtttatgtgtgaattggtcttgttatgcctggaaagcactgtttctttggtgtcttccatccccactggctcttataatctttctgcctcctcttctgcatggctctctgagacccggtacacctcaatctttacgtaaaacttgcttgcttctgaaataaatatcacaaatagaatacaagtaggagccgcagccaggaaacagtgaatgtcaggtcgttgtgcacaataataatttctccataaactcttaactttagttgctttgggaaggattggttcaagtgactccatttttattgttggctgtgagacaggctctcaccatgaaacctacaccggcaccaaactagtttatcctcttgcttcaatctcccaagtgccaggattagaggagccaacatgctccacttacaagagctaatactgaaattacctgtccccaaatggagaagacctgtttctcattagaatatctttattcctgccaggaaagttaaatggacatgacatgggtcacagaaaagcattgtaaccacaggtatgaactagtctgaaaaaaaaaaaaacttgtatattagggctgaagaataaatgtaggtactttaaaaatattttaaatttttatttatttttattttatgtgcactggtgttttgcctgcatatatgtgtgtgagaggatgccaggtccctggacctggagttagaggcagttgtgagctgccatgtaggtgctgggaattgaaccaggtcctctggaggaacagccaatgctcctaactgccaagccatctctccagccctgaaggatggcacttttaaatatggaagattggatggttagagttctggagattgtaaacaaattcattaaggggttcagccaaagtccagttgtctccagcgttagaagaaccaaacctaacttagatgttcttaatttatcattaattaattactattcaccgtttgtgattattttgccaggatcagtgttagatgggtaacatgtatcatttatttattctttgtagcattgtaagaactattattttgtcttacatctaacagaaacatagcttgaagaaagtaagccacctcgttagtcactgactatgatagttaaacttagttgtcaacttgggggctatggactcatctaggagatgctcatctgagcgtgtctgtcaaggatgtgtctagagatacttgaggagggaaagtctaccctaaagtgggcagcaccatcccataagctggggaatgaaaggcgggaaaggcgagtaccgacattcatgtctctgcttcctgactgtggacaggacaggaattgctgtctcacatttccgttgccttccctgtcataatgggctggaattctacccttcttccgttaggttgctttggtatggtgttttatcacatcaacaataaaaataaccaataaagagactgtatcaggagtgacctgaggtgtggctaactctaaaatctaggacgtcagtggcaggtctgaattaaaggggagtgacaagatgtgaatgctcctaggcaacacagagaaatctgaaacacgaggcggagagcttgccttcccaccctcaccgaggagcacaatacaggtgcggtctctccctgaggatgagagcctcgcttccgtcaccagcttctctcacgctcatccatgtttgcttatttccttgcctggactactctcctactgtccctaattgttctgatatctcagactgtcctacgattactcaggactcagcttttaggaaaaataaggtgagctggctggtaggtggctgtagagccaggtggaagccaggtctctcaaactccagtgacacctttgagacttcccgccacattctgtgtcagaaggcggagtaggaaccccatatctttcttcattcgaaagaaaccagttatcatgtgccccctacagctccctggaagttaattcttacccatcgtacaaggtagagtgaagtatactgtgtcatttttgctgcttgcaggattatggacttcgcaggtgtaaaacgtagacttgttctgtggagtgacaattatgtcgagcacatctcctgtaccattttggaggagagaccccgagtcatcataccaagtgtattgaacgttctgttgctctatcttacatgatagcttcagatgacaagagccaggcaaatttttagtctcaaattttatgaaaggcttggacacaggatctggaaaaaaaagattaaaaaaaaaaaacacgttctgagacaatttttgtggcattcatgatgcaaggatttggccaataaactacaaaagggaccggggaggggccatgattgccattcaaggtggttatggacaagagacgcctacagatggagccagggagcaactttgtcttcaagaggctactttttggtggtgatgctacggtggatccaggagggggagccagagctccttacatgccattaggaacaaaggggggtgatgatcatctgcgagccaagtactagtggggagacccgctggcttctgactgtgtttcttaactacctgagatacttagggtctgtcctctgacaaaagcccacaggaagcaccaggggcagccactctttccctcaagaatcctggacttcagatggagggagaaccctgaagggcctcaacctgcacacagcaaagcccttcacacgctatcattacaggatgcttagctctataaacctgccatctctgtctccattgtgaaccagaagctcataaagaaaacggatttgtttagtttgcccagatgatgtaatgcctttttctatatgactttctgtctaagtacttaataaactcattaagtttgcttcattctggttcagcatggactcttttgtgtggggtaatgaagaatccggctttacctgagcgggaaaaccccaaagggaagttgtactttttagccaccggcggctgttagctatctcccacccctaacacacactgtccctgtggccatcttacaaactgtaaaaagctgtgagacaacagctagaccataaatttaactgcagaacagattaattggtcctttcctgaggaaaatggaacctggaccttaggttgtttctgaaaccatttttatttaattctggccaaggaaatgttttaagcccacccattctgaaagagaaaagatgtaggggttctattcattctggcctcatagatttctttgttcttagctctgccaatgtagcagggagacatatcacaacacagccaccagtggcctaagcagtttcctgtccctttgggaacctccatttggatagagatgggtctttggtgacccgcagaaaagaattccataatgaaccagaataaagcaaagttgtgtgtttatcaagtatctagacagaaggtcacatagcaaaatgcattaaataatctaggcaaactgaaaataagcgcatttttccttaagagtttctgattgggcacaaagccaagcattgaaagttaagctcctctatactctcttgaaatactctgtagagttccttagaacacctctctttttttggtaaatgtaaagagaattggcttccgtcatttccctccaaagaatcttacctaatatggacaaaacatattaatatcttataccatggtaccacagctactgagtaactgatcagagggatttttaaaaagtgttaatggctacataataactgtacatatttgtgggatactatatgataattaaatatacatgtgtaataattacttcaagaaaattgagatttgtctcctcaaatatttaccatttctatgtgttgggaatctttgagatttttttccagctattttgtgatactgtgctatggaaccctgagatgaccccttctatttcattttatgtaagtcttcattatccaacgtcactccagtgactatgaaatcaatcttcttggcttccacaaatgaatgagaacatgggagcatttgtttttctgtgcatagttatttcatcgaattggagctttgaacctgggtttgtaagacccccagaagctcaggcctccaggatcttttcccaggaccgtggccaccccaatcaccatgcggaggcggaaacctgatgcaaacaacaagaggctttaatgaaaggtggacgttggtacaaacgggcgctctcagcatgcaggctagagagcagccccgtcccccaggcacaggcgtttttaaaggcaaaacccacaagcttagggaggggcctcgactctctattcgttgagtaggtgaccagagtcgtgggttcctaggaggccctttgtcttgaggggaggcctgggaataagatagcctcctgacacaccagttgtaaaacctgcagacctcaggatgtgcttatcttgcctgagcaaatggtagctatctctttgtttcataggtttcatagagacccttaactgttaattattgacacattggccagtggggcaatctgtttcctccatgagcccctcggggagggtggccatctgggaattcttggtacccagttatcttatggccttgtaagggagtaattgctggtggctggtaaattccaggcactaagccacagtagtggccttaatcagtttctgggttagaccgccctatattctgtttggagagtttccttatctgggctatgtttctttgctaatttttaagtctttcaggtctgcctgactccaaggataatgccctcgtcttatttccatatgaactggttaggctgaagctttaagtagaaaatcttgtcatattcaatctgaaagaacttacccggagaactatctcaatttatatttatagtatatttttttctataagtgatgaagtctgagttcaggcagaattaaggtacattcaaaactaatttaagctgcttacaggatagaatgaaggaactagagaagaaatagtccttattgtttcctgtctggaaacaatatagtttgttccttcctgtttgagactcttcaaaagggcctcacattgaaggtttggtcactagtaagcagtatttgtggaaagtaattggtccaaaaagctcttatctcatcaattggttgatttattgatggattaataattgaatggactattaggaaatggtagaaactggaaggagggacccagttgagaaagcaagtcactaggaacatatgtttgaaaggcatatcttgtccttggccttcgtcctagtacctccctccaagcctggggtgattagctctgctccattgcccacctctgccatggtgctgtgggagcacagttccacagtgatagattccattgaccaaggaccatacaacctctggagccgagagtccaaataaaccttgccttgtctgaagtctctatcagagggttttgtcttagtaatgaaaaatcaacacaatttctctttaaatcttagacttacttacttcagaagagatttcaaatgggtgacagttgccagctctgatatctgctgggtgattctcacaaatagatgtgtctctgggagacataaattaagtgtgtgctgatgttttgttctccctctccagacagcaccccccagtagatcagcaaggtccctgaataagtatttgtcctttgcctccaaaactcaccaaatacatccagagttatctcctcctgtttctcagtttcattcaacactctcatgtagtagtgacctttgtcttctttccggacattatagatacgaagtgcaccatttgtatggttaagttcgaccctgcctttaaatacggaatcaaagatagtctctgcaccgttatactcgtgttctaaaatcttctgttttttagtgtaaagccaggtgagatatttgtagggtccaagctgttgcttgaagacttgcagggttatgttgctgcccgttgtagcaatttcttttaattcttttaattctgaacgatctgtcaataaaagtcagagtgagactcatcctggagaaagcagtgccgtccaatggcccagctttagcttaaggtggtagtggaggaagaacttagagtctgagaaacaagggccgagcagggtggagcagaacatattgattacaattctgaatgttctctgtcatacaaaaagaaaaggggtaccaggattatcctgatgctttctcattcatagcctccaccctcatagtttcaaataaatggattccaagtcctctccctctatgagtctgtttcctgtttgttcagttttattcaataagcacgttagtcatagacatagacatagacatagacagacattgttattacataattatactagaacagatttaatacacaagtgtcagctgaccataaacaaatcaacctgggttaggggtgtagcttagttggtagagtgcgttcttgtcttcctagccttcaggagacacaggcagaagaagaatcacacggcgagggtcctccttgtctacataataagcttgaggccagcttggcctacatgagactcacgtccatccaaattaacagtatgatagcttgttaggatagtaaagacaaggacaaggtggtgagtatatggactggagcataagggatggggggaagctgggcaaagctctttggagcaatggccactaatgtgaattaggagatgtttaaaagatctggtgagaatcttgtgtcagctgctgtatgaggaggtgggaggatgtcagtgagttaaacataagaggcccttgagctaagagtaagaaattaacatttctgccagggaagcaggtaggctgactccagttcttcacctctccctctgctcctccagaattaattcccgacctcatctccagatctgcagcagaacacctattgaagagcacccctgcccatccccagtggatcacacagatattcccatccaaacttccttttcccccaaattgctttgtcccagtctccacctccagcatgaattccttaggaacccacagaccaccctgtctagagaagcacaggaactaactgcaggtcttcgccctttctccattcctccaagtccaaccccagagtcctatccccagctctgaagcagaccttctgctgtgtcctctccttatactctgcaccagttttaagggaactgagcagatcctggtggaataccttgcttccttccattctgttgacaacctcagtcctgccagcatttaccctaatctaagtgtcagcttttagtacccataaaacttttcaactggaacccccagtggccacacctgccaggacaccagaaaaatactttaccaggcaacagccaccacacttccctaaaatccagagaggaaaagaaaccaaggaatgaaacacccaacaagacaagaccagatatcaacacctacagctacagtcttccaaatctcagatgcctagatgccattgtaaaaacacaataatagccacaaatggctccacagagcccagcaaccttctgacagaagaccctgactattccaacctagatgaagcacaaagaagagaccttaacagcctttatgaatatgatagagttccttaaagaggaaatgaatgagatccttaaagaaatatatgtaagcacaaataaacagtggagggaaataaatcaaactgttcaatacctgaaagtagaaatagaaccaagccagactgtagaaaatcaggaaatgaaaaatttaggagcttaaacaggaatgacagaagcgggctttaccagcagaatataagggatggaagagagaatctcaaagacataagtggatagtgcatcattcaaagaaaatgttaaatctaaaatctccttgcacaaaacatccaggaaacctgcaacactatgaaaagaccatttctacaaataataggaatagaggtaggagaagaaacataggtcaaaggcacagaaaacattttcaatgagatcacagaggaaagtttcccaaataaagaaggagatgcctatcaaagtataagaagcacacagaataccaaatagactggacccgaatggagttcttaatgggtctaactaataaaaagctggagtcagatatagaaggaaatgctgaaggatcagagaaaaggagcaatgccttatctcctaagcatctcagcagggaagagagtgatttcctgtttctccctgcttgtatcctatgtctgcacagctgcttcactccctaggggtctggaggtacagatctccagacctctatagttagctagtggcaagctccattctctaaccccaagacaggctttatttgtgtaagaaagatattgccacactctattacacatgataatcaaaacactaaacatacagaacaaaaaatattgtggtaatatattatttatgatttattaaacatgcctgagaattcagaaaagcaaaatcagcctcaagctatagagatcaggcagtggtgatacacacctttaatcctagctgccagaagctaggaggtggtggtacacacctttaaccctagggctaaggattaagagatagactgatctctgtgagtccaaggccacccagatctacacaagattgatccagtcctaaagagaaacagctcacacaaagacaacctcagcacctgaatctcatgcctttaatcccagcaatcgaggggcataaaagatagaagcagggtcttcagtagtcaatatcaggcattcactctccaaccacaataaagatagaaatacattgaagtctcaagattctccagccatgctgaggagaggttacagtctgaggtttggtggagccaggatcatctttcagtctgaggcagagtgaaagcaagtgcccagatggtttgcttttctgatattcagcttgaagcatttttcatgctacaaaagattattaaattcttcaaggggtaaaagtccaagtaacttacaaaggcagacatattagaattacacttgactactcagtggagactctaaaagttagaagtgtctgaagaaaggtgctgcagactctaagaggccacaaatgtcattcctgactaatatacctaggaaaactttcaattattatacatggaaaaaataatatattccatgataaaaaacaaatttaatcaatatctgtctaaaaatccagccccacagaaggtgctagaaagaaaactccaaactaaagaggttaaatatgtctaagaaaatagagaacaaataatcctagagaagcaaagtcaaaagaagggaaccccaacccaccccccaaccccaacacaaacacaccaacaaataataggaatcaacaaacactgctcattgacatctgtcaatatcaatggtctcaattccccgaataaaaaacgcagactaagagaatgggtgcaaaaacaggatacatccttctgctgcatccaagaaacacaccttaacatcaatgataggcactgaattggggtgaagagttagagagaaagattccaagcaaatggaccaaaggatcaggctggtattgccattttgctgtctaacaaaatagacttcgaagcaaaactaatcagaagagataaggaaggacacttcatactcatcaaaggacaaatgaaacaagaggacatctcagttcttaacatctaagcccaaacacaagggtatccacatttgtaaaggaagtatggctacagcttacattacactttaattcttacacaagggtatccacatttgcaaaggaagtatggctacagcttacattacactttaattcttacacaagggtatccacatttgtaaaggaagtatggctacagcttacattacactttaattcttacacaagggtatccacatttgaaaaggaagtatgactacagcttacattacactttaattcttacacactaatactgcaggactccagtatcccactctcaccaatagacaggtcatccagacaaaaactaaacagagaaatgctggagctgactgacagaaaccaaatgcacctaacagatgtttacacatttcaaccaagctgaaaaggatatactttctcctctgcacctcatggagctttcttcaaaatttgctacatgctcagacacaaagcaagtctcaaaagataaaagaaaattgaaataactccttgaatcctctctgaccaccgtggattaaaactgaatatcaacaaaaacaaagacaacaggaaactcacaagctcatggaactgataagcaagagaacaactcacatctgaatgaaaaatagatcaagacagaaattaagaaagaaatgactttctagaattgagtgaaaatgaatacacagcatacccaaactaatgggacacaaggcagttctaagaggaaagttcctggcactaaggttccacatgaaaacttttcagcaatcccacacaagtaacttaacagaaaacctgaaagctctagagcaaaaagaagtagccacaccaaagaggagccgaaggcaagaaataatcgacccagggctgaaatcaataaaatagaaacaaagaacaatacaaagaatcaatgaagtgaaacgttggtactttgagaaaatcaacaaacccatatctaaattaactataaggcaaagagtgaatgtccaaattaactaaatcagaaacaaaaacaggggacataataacagatattaaggaaatccagagaatcattaagaatatacttttaaaaacctgtactccaccaaataggaaaatctaaaataaatggataattttttctaatacactctgactaataaagttactcaagataagataagcaatttaaacagacctagtgacatagaagcagttgttattaagtctaccaatcaaaagaggtcatggccagatggttttagctcagaattctttcagagttttaaataagagttaatgccaatgctcttcaaattattccacaaaataaaaacagaaggaatattcatttttgtgaggtcataattaccctggtaaccacataaagattcagaactagttacaaatcagtgccccttatgaatatagatgcaaaaatacttgcaaactgaagccaagaaacatcaaaaatgtcatcaaccatcatccattaagcttcagcccagaaatacagggattgttaatatacatatctaaaaatatataatccactacatgaacaaactgaaataaaaccaaatgatcattagatgcagaaaggcttttgaggccagcctactctacagatccagtttcaggacagccaagtttaggcagtgaaggaaaccattgaaaatagaaagttggtgaagatgtaattgaataagggggacatattccagtcccagtaggcagcaggacttggcagctttggccatgtggttctggttttaaggatagaagaaaggggctatggaatattcctccacaactaaagatagcaactgaggtcaggcatgtgtcaggggtattccagaatggaggtctacagaagccactgcatgaagctgtgaaggtgaagcctggattgccttggagaacccaggatgttagagatgccagagctatgggatacctgctaaggagagctgctacagggagtggaagcagcccaagagaaagaagtgtgttgcagtcaacaaagctgaaaggagttggagatctgaaatattttgacatcagacctggagatgcagagtttggaatgcctggcttgttttgggtcttactttggtccagtatttcctcactatgctcccttcctatattttggaatggtaatgtatatactgtgaccttatatgttggaagtatgtcatttgatttttgatttttattttacagggatcgcagttaaggaattgcatgaatcttagaagggactttgaactttagacttttaaataagtttgagactgctacagactatgggacttttgaaggtggactgaatgcatttttgcattatgatgtggctacaagcttttgaaggccaggtagtgcaatgtggtagcttgaaagaaaatgttccccaaagggagaggcactattaggaggtctggctatgttggagtgggtgtggtcttgttagaggaagtgtgtcactatggaagcaagctttagggtctcatatatgctcaagccacacccaggagacaggccacttccagttgcctttggatcaaggggtatggtcttgttagaggaagcaagctttgaggtctcatatatgctcaagccacacccagtgggcaagagacaagccacttcctgttgactttggatcaagatgtaaggactctcagttccagcttcatgctgctttgtttgccaccatgatgacgatggactaaacttctgaactgtaagtgagccactcctttagatattttcctttgtaatagtttccatggccatggtgtcacttcacagcaatagaaaccttaactaagacacctgcctctttacaaacgacagactgagaaacagatgagggaagcaacacctttcacaatagcatcaaataatataaagtgtgttaactctaatcaaacaagtgaaagacttgcattataacacctcaaatcattgaggaaagaaaatgaagaaggtatcagaagacggaaagatctcccattctaatggatctgtaggattatcagagtaaaaatgaccatcatgccagaagccatctatagattcaatgcaatcctcatcaaaattccaacacagttctttacagatcttgaaaagacaagtctcagcttcatatggaaatcccccccacacacacaccccaaacaggatagctaaaaaaaaaaaaaaattctgaatcaataaaagcactgtgggaggtatcactaatcctgattttaagttgtactacaaggctaaaaacagcatgctattggcacaaaaacagacatatagatcaatggaattgaactaaagactcagatataaatccacacaccaaaggacacctgatttcttttaataaagaagccagaaaaacacattttttggggaaagaggcaatttatacaaatggtgctggttaaactgaatgtacacatgtagaaaaatgcagtgagacccatactaattattctgtacaaaactcaagtccaaatgaatcaaagatctcaacataaaaccagatactctgaacctgattgaagagaaagtggggaatagtcttcaacacactggcacagtaaactatgttctaaacagaccactgttagcacagggactaagatcaacaattgacatatgggacatcaccaaacagaagctcctgcactgcaaaggacaccatcattgggacaaagtggcagcctacagaatggaaatggtttttaccaactccacattcgatagaggactaatattcaaaatatgtaaagaactcaaggaactagatataagcaaaccaaatactacaggtaaaaggcagggtaccctaacctccaaacagcctcccattaagaagtctctgttactctccggctccatcctgcctccaacccacttcctgtacccagccttcccaaccagttcactctagttcccatctgtccatccccccaacccctacccccagtttacccagatcttttctacttccccatcccagggaaatccatgcacccctctttgggtcctccttgttatctagcctctctggggctgtggattgtaggttggttatctgatactttcctcctaataactacctatgagttaatatatactgtgtttgtctttctgggtctgggttactttgcctgcaaatttcatgaggtcatcattttttttttttttacagttgagtattactctgctgtgtaaatgtaccacattttccttatccattctttggttgaggggcaggtaggttgtttccaggttctggctattatgaataatgctgctatgaacatagttgggcaagtgtccttgtggtatgattgtgcatcctttgggtatatgcctaaaattagtatagctgggtcttgaggtagattgattcccaattttctaagaaatcaccataccaatttccaaagtggctgtaccagtttgcattcccaccagcaatggaggagtgttccctgacataagcggtcatcagtgtttttgatcttagccattctgacaggtgtaagatggtatctcagagttgttttgatttgcattttcctgatgactaaggatgttgaacatttctttaagtgtttctcagccatttgagatccctttgttgagaactgtctgtttagactggtactctgttttatatatattttctctaaatagataataaaagttttttctttaaataacatttttcatttattttacataatacccaccagtttcccctccttcttctcctcctgtcccctctcctttcccaactctccccctccccatccactcctcctccatctccattcagaaagagacaggcctcccatggacttgcacaaagcaaggcatgtcaagttgaggcaggaccaagctcctctgtttacacgaaggcagggccaggtaatccagcatggggaacaggttaccaaaagccagctaagcaccagcaagaggtcctgctctcactgttagaagccttactaagagaccaagctacacacatgcagaggacctaggttggacccattcaggctccctgactattagtccagcatccatgagctcctgtgagcctaggtcagtggtctctgtgggttctcaccctcatggcttgtatgatctctcctccctttcttccaaaagcctcttggagctcagtgcagtgcttgtttgtggatctctgtctctgcttccatcagttgacagagtatctctgatggcaattagggaaatcaccattctacttacagtagatgaccagttcaagcaccctctccataactgctgggagtctcagttggcgtcatccttgaggcttccttgtggtttccctggcaccaggttttcctacagagtaggaagagatcctcaccaaccccacatcttacagaggctgatctccaaaatatataaagaactcaagaaactaaacattaaaataccaaataatccaataaaaaatgggttatagacctaaacagagaattctcaacagaagaatgtcaaatggcccaaagacagctcatgctgtcaaggatgtggaataaagggaacactccatcattgctagtgggagtgcaaacttatacatccactatggaaatcaatatggtggttcctcaggaaggtgggaatgaatctaccttaagatctactgtaccacttgtggtagtttgaatgtaaatggcccccataatctcatagggagtggcactaggatgtatggtattgttggagtgggtatggccttgttagaggaagcgtgccactgtgggtgtgggctttgaggtttcctatgcccaggatactgcccagtgtctcagtcaactttctgttgcttgcaaaatgtaggactcccagctattcttccagtactatgtctgcatgcatgtcaccatgctccccaccttgatgataatggactgaacctttgaaactataagcaagctacctcaattaaatgttttcatttataagagttaccatggtcatggcgtctcttcacagcaataaaaccctaggacaccactattgagcatatatctaaagtatgcttcatccttctacagagacacttgctcatccatgttcattgctgctctactcataataaccagaaattgaaaaccccctatatatccttcaacagaataatggacttgaaaaaaatatgtagcacttttacacaatggagtatcattcatatgtttaaaaaattacatcaggaactttgcagataaatggatggagctagaaaaaaaataatcattccgagggagttaactcagacccagaaacacaaatatggtatgtaactcacttatattagctgttaaaacaatgacaaccaagctgcaattcacagagttacagaggtcagatatagagcaagaattaggggttacagatagatcttcttaggaaaggaaaataggataggtagttatggatagatggtgtggccagtacaggaggactaagtaaggaggcagaggggaaaaggccatgagggtggaaatatggggagaaacacctaaaattaagggcaatttgggggagtattatggaaacctaataaagtagaatcttccatgtatgtatacatgtatgtatgtatgtatgtatgtatgtatgtatgtatgtatgaaactgatctaaatgaaatcaccaaatgatgggagagacagagtcccaactggtcataccttgtcaccaaatgaagcttcaagtaccagggttgggttacattgaattgagttttggtcaaagtagtccatctcatgggaattcccaaataactcagactgttgccaagacaataagttgctttccacaaactgacagcaaggccccattgctgaaaacaacacctacataactcattgaacatagagaagtcaagctggtgcctacatagagccttcacccctgtggactagcatctctggtacaggaatgtactctgtaccctaccaaaagagaaaggtaaacaccaatccggccacaaacccttgatctacaatggtgtccttcctgcacgatgtgctagggcactggtggcacgcatcttaagggattaaccaaccaacatctgatctaacttaaggctcactccctgagtggaacccatgcctggcactccttgggtgatcaagaaccagagtctagatagcccagggacttttggtaaaaccaaatactactgttctaaaaaacaaaaaaacacaaccctttctcaataaaatgactcctaacgatgctttgctatacccatagatcagtgccttatccagccatcatcggagatgcttcttcctgcagcagatgggaacaagtgcagagacccacagcccgacagagtgagaaccgtggaatactcagccctaaatgggatgtctttatcaaatccttctgctcagtgctcagggaactccatggaagaggagtcagaataagagccagaggggatggaggacaccaagaaaacaaggctctttaaagcatcatgatcaaagctcacatgaactcagagaggataaggcagcatgcacacggccttcacaggtctgaatcatatatatatattcattccagtttagtgtttctgagtgtgtgaacaagtgtgtctacgattcttgtgtgttctcttgagctcttttccttctatttttgtcttgtccaattcaatgtgataggtttttaaatcttatattatattttgttaatatcccttagaagcctgtttgtttccttacaaaagacagaaagtgagtgcatccagttgtgaggggtcgtggagaggaactaggaagagggaggggaaccatcatcagggtatatgaggaaaaaaaaatctattttcaataaaaggaaaaaaacgaaatacaatacctgaatatagtataaagcatattacacagtggtgattgctatgaaaaaacaaagaaagcagggttatgaatacccgtggagagttaggacaaggagatggcatcataaggtgatgtgtttgttgcatctgagcacagacttcaaggagagaggaagcctatcagatatctcccatgacagtgatccaggtagagaaaggtctacagaaaaaggctctgtggtggggagtgtgcctgccaacactgaaaagatctcagtgggtggtgtggaggggtgaagaaagggggcagcaaaagggttgaagataatcagttaatgatgggggctgtccttctgtttatatgcttctcttactggttgatgaagaaaacactgtttggccaatagccaacagaggcaggaagatgggtggggctaggatatgaggagaattctgggaaaggcaggcaaagagggactcaggaagagatgtggtgtagctggcaaaggagtaacaggtccagacattcttcggtaagccaagaccacgtggaaatacatagatttatagaaatgggttaataattaaaacagcgttagccaataagaagccgtagtgattggtcagcacttttataattaatagaagtttgcgtgtgtttatttggggctgaagcagctgtgggacctggcagaacaagaaaatgacagcaacaagttaaagtaatttttttagtgatgttttacttttgctattaaaaaaaatccaaccaggtacagtgatctgtagggagcctgaggcaggaagatcatgagtcctgggccagcctggctatatagtgaatttcaggctatcctgggctacatagcaagagctgctcaaaaagaaaacagaaaattaattacattaataataattaaattaaaaatttaaattattttttaaagttccctgtaaaatggcttatatttacatagacacatttttttttaaaaaaaaaaaagcaaattgctagaaagtaagaaagaacagataattttcataaaatattatctgagacagtttggttttgaggcaaaattactataaaaatgatgtcactgaagctctggagtccccatgttagttatttttctgttgctgtgataaagcagcataaccaaaagcaattggggagggagagtttagcttacaactctgaggtcacactccatcactgagggaagtcatgacaggaactgaaggcaggaaactggaggctggaactgaagccgaaactctggaggactgctactcatttgacttgctcagcctgctttgttatacagtactggcccacctacccacgggtggcactgtccccattagcttggctcgcccacaacaatcattaattaagaaatggcctacggatggaggcattttctcagttgaggttcctcttcctgattaactctagctcttatgtcacctgacaaaaacctggccaggacaatcccttatatccttgttaggtgccctaacagtgtctttatgtaccaacatatttcattaaatagggatttaatcacatgcaatggggctacttcttgttttcaatccaacagcatagcctcgtccttgcttccatgttggatgatttcaaatgtgtgggtattttgcaatcttcctaagaggaactagaattgggggatgtctatcttgagctcaaaaggatatcattacatccatgtaattatatagttcagaaactcttccatgtaaggtattgctacccacataggcaaacaaatgatgtcccctctgcctggtgtgacatctcacctgctgtgtccctgccacatagcaagaggcaaggatctaccatcatcaacagcctcctcttcaactaccaatttccaaaattacagctacagccccagagcttccaaaactcactcaacccttcgtttcaggattcattgatctgttcagtctacctattcattcaacaaatgtttattgagagcttaactgttagatcaccaagcaggccccaaaatggcagtgctactgatgagaccctaagaggatgtccagggcccaacccaggtgaacagaagaacccttaccatataaactgaaccctaaactcagcatgccttagacgccttgtgatttcagtctctgtttgtcaggaaagccactattttctttctctgtccctaatggcaaaccactgtaagcaaagtgcacctagttaagtcaaacaacccgtgtcccctggagactcccaccctgctgcctgtcctataaaatctatttgttttcccacccaaccactgctctctactctctgagacaattgtctcactttaaacttgttctatccatggagtggtctagtttggtgatttcactgtacttgtttacactgatcgccctgtataaatctttccgccagccgcctgagttctgccgccaccttagggccaccaaataacacacagagtcttatattagttacgatgttgctggccaatgactaggatttcttattttctagctctgtcttaagtatcaaccataactattaatccatatattttataaagacttattgaggaggccagcagcatgcgtcctctcttccccaggatcacatggagactcctctctactacatttcccagaatcctccttctctcctagtcccacctatcctgcttccctattggccaacagtgctttatttgtcaaccaataagacaaacacatagatagaaggacttcccccatcactgccctgtccttttatctatccagacacacccagacacttgtttccaagttgcttctgattggtccagtccatattttaccatgtctctcagaatcatttcagtttaaacaacatgccctggcatctctgggctttgatagcaggaatgagttcaggtgcctggctgttagagcacatagcataagagaatattcccactgggctttttgttttagctgtttttagataaagtatcatgtaacctaggctgacatcaaactcactatgtagttgaagatgaccttaaataacagattctcctcccttagtgtcccaaatgctgggataacagccatgtgtcaccatatccagaattttaagtctttagatacatattccaaatttactctcattcttatttccatgtgattttaatatggggcctcggtcagtgatttactattgatacgttggtatttagggccaaacaataagctttttttggtaaaggagaagtattttctgtgattctaagaatctaaggttctaagtaactctggcctcagcccaccagacacctgaggcacttccttattggataaccaaaagcatttcaggtcttgggacaaaagttccccaccctcatccatgaagaactaacttaatattccaggacagcctcgctggcaagtctcagatgtacactcaggagatggaaagctcatgatatgatggcagaggaaaagaagcccctgacccttcccctgtgggagagcagtgagcagcagtggcgagcaggatgtcgcatcttcctcttcaaccatctgcatgtaacatttctaaaaaggctgacctaatcactgggtatggctgcttgcaaaaataaggaagtggtccgttggtggttaaagccttgtcgtaccttcttaatggttatggttattttttagaaaatagatgagacaaaagtaaagagactgatggctgttggttttaacgcaatataacaaaactgttggtagcgtgtctagatactgaagacaaagtaacagtatgctcctgtagtttaaaatagggatagaactaatcctgcctctgtttatccatgttacccgtctgttaaaaaagcataattatagctgttgtgatagcacgtgactgtatcccagcactcgaaagtttggatcaatagaatcatgagttcatgagttcaaggccatcccatgctacatgctgagccccttaaatctctctctctctgcctgcctgcctgcctgcctgtctgtctgtctgtctctctctgtctctctctgtctctctgtctgtctctctctgtctctgtctctctctctcacacacacacacacacacacagagagagagaaagacatgggggtgtgtccataatctcatacaaaggcattactcagaaaagagaaaatgttctaaagaagaagaagttctgattactaaaaccacaaatcttgtatttttagtagaattcttaaagaagagatggagatgagtcttgaaggcattggtttggtgtcacctggagcaccctgatgagaccaaacatttaagaagcctatgtatacccgtttaggaactaatttggcaataaatattaagaccctagatctaggtcttggtgacaatacccagggtgatcttttttgagacagggaatatgagtttagtaggttgattttacatggaattctgaatgtaaaaaatgaggaacagaaatcagccatcctttcaagacattcaagtatgaatgggaaggaagatagagcatgggaaaggacataaagggtgaagagaggtttctgttttgtttgcttgacttagggactgaaatggcttaaaatgtggtctaagtcaaggtttagaccacaaaactgatagagtgacttagtagataagggacttaatagagtggttcacaggttgtggcccagctagtccaacaatggctgtctccttacagagtccaagaattgagtagttactcagttcatgaggatgaatgtctcagctggtcttcattaacaagagaatcctgaaaaagtaggctccaagacagtaccagcaagagtgagaaggcaggcaaagagcaaaagctttctccatccttgtgccatgtgaaggtagggccaactctaatgatgcaattaactgacaatagcacccaacattccaagatgacagaggcaaaggagatgagcacggatgaggtgagggcaggaggcaggcaactgcaagatggctatgaacttggtgctcagaatttgggctctctcatttgccatagcagttattgaggaggtttgaataaaagggtgaaataagtataactattttagaaaatttacaccaatagcagtattcaaaatcaactaggtatagagaacagaccaaaaaaagcagttaggattggcgagtgcaacaccagaaagtgggcttttggtccaagatgaaagagaatggaagtaggtggactaacaaatgtctggttgggagaggcaagggaaagataagacctgaggataacgactagagttctagcttaagaaactgagcaaatggacatgctattaattgaggcagataacaatgaaagagcagaaaagttggggcagagagaaactacggaagagcttttgtttttactttttaaaaaatttatttgtttaagacaagacctttcttatgtaaccctggacatcctggaacttgttatatggaccaagcaggcctggaactcatagagatccaccagagtgctgagattaacagcatgcaccaccatgcatggctatgggaattttattttaagttggagccgaggatgtagcccagtgacagggtatttgacacatcagagccctattccccaaattttcatttttaatacccctcccatcagtagatacacttttggtcccttccccttgaagccagttatggtggtctaaatctgtaattccagcagttaggaagtagaggtagtaagatggggagttcaagcttgttctcagctacacagcaagcacgaggccagcctgggttataagagaacctgtctcaaaagaataatgacgatatcccttcctcttgaagctggataggccttcatgcctgccttagtgaacagaactctgagatgtggcttgcaaagctaggtgagaaataatagacactattggctgggttgtcttaactgaccgtaggaggcactacagttagttagacactgaccgtgtggatgaaagtgactctcaaatgactgtaggttccaccatggtcctgctgcaaggaggagggattccttaaatgaaaagtaacctagcaaaacccacctccagctcatgagtgaaattagttgtagcaattattttgggcactgactctgtgaaaggctcgttaaaagaaaaaaaacaaaaagtcagaacaaaaaatggtgagtcaaattttgaacacatgtttggaaagtctagagtagacgcttgaagaaaagaagaacagaaattcggatctgaggtacaggcaagagtttggggtctgagagttcatttatggggatcccccactcccatttgatgcatgtgtgtcctcagggtgtcttcacattttaaaacttcattgagtctgactataagttcctcagagacataaaaagtataatatcatgcccattttagagtggaggagatattttaaaagctctaaagatggagcccagacagaaaacatctcttcaggttcccaggataatgccatttccagtgcacccttctacctgtagggagagaacaaaatgcctctcaggagcagaggattcttgtgaatcatctccttgaaatggacagctgaggggagaggggtaaagagtgcacctcaaactttactctgaaggcaaacattgtgaaagagaagggactcaaatgctcacaaagttatggatgtgtagaccataaggaagtttttgaagttactcattcatttgtttaacggttatttactgagtatatgctgtgctccggcctctgtgtctaagaagcagaatgctgactaaagaagacagaaacaaacaagtcataagctacaatccgaaccccagaatttcaatgaagaagatgcatgcaaatggaaacctgtggtgaagcagaatgagttgaggttacatggaattcagacagaaaggcccagagttaagaaggatgctcctttgtagacaaacaaccaagttcagccagcttggtctcaagagttgactaactcatcctatcagttccaatgttagcagccataattctgtgctatgagctaaagcaacccaaggtggtgagtatagttacaaagggccctgcagacaatgcatccatagacttgaagccagtctgtgtaagaacgccaggcagagaagcatggtgtgaatatcggtcaactctcctccacacagggctggctcttctccggctgactacgctccctccataacttcttgttcactttactccttttcacccacagggctgacatttgtgtctgtctctgacacacagtaatttcccttttctttctttcttttttttttaagtaatttactttttttttttttttagctcagggcaggacggaccccttacataaataaagttcctgagacacattgcttctgatcagaaaacatggcaaccaaacaatggggcacccctcagcagagagcttctcttacctaaaagtatgttcctgtaatttcacagaccaacagccatgagttgcagtaccggggacctacttccacatccccccgggtcctgtttctcatgtcccctcgtgaaaagaaacggggcctggctttccagagttaaagaatgccccccagccttcccacagccccactactagcagcgaagaaccctgcccaagagctcacccatttctagggtggaactacttctcccctttcccggcgagccatgccgccagtgcacaaccacaatcagacactgggtggaaactacctgaaaatcccgatatcagaggcaggagaagtagcatttccaagacccgacaccattcttgtcttctgaagtggcacatgctactttgcaaagcttgctaggaacactggcgacaactgtgagagaaggcaggggaccttagggtcgaaaaccagaaacaggaagttgttttttttcttcttcttctttgaggcgggtaataaataatatgtgggggtgggcagatggtttttgtctgtaaacctaggtggtctagaattcacaaagaccacttgcctctgcctcctgagtgctgggattaaaggtgtgtgccactacaccctgatggagaatcaaaggtaccctcccctttttttaatatttggccttttttttttcagatgtttttatttgaattagaaacaagattgttttacatgacaaccccagttcccttctccctcctgcccccctaccattcccccgccccaactaaaaccctccctatcacatatcctttctgctccccctggatggtgaggccttccatgggggggatcatcaaaatctatcattacctttgggatgaggcctaggcccacccccgtgtgccttggctcagggagtattcctctatctggaatgggctcccaaaatccacacctatgctagggataagtactgaactactacaagaggtcctgtagatttctgaggtttcctcgctgaaacccatgttcttggagtttggatcagacccatgctggtatcccagctatcagtctggggagcaagagctccctgatgttcaggtcagctgtttctgtggatttcaccagcctggtctggacccctttgctcttcactcatccttctctgcatctggattccagttcagttcagtgattagttgtgggtgtctgcttctacttccaccagctgctggatgagggctatagaatggcatataagtcagtcatcaatctcattatcaggggagggcatttaaggtagcctctcttctgttgcttagattgttagctggtgtcatccttgtagatctccagacatttccctagtgcctgatttctctgtaaacctaaaatgtttccctctattatggtatctccattcttgttatcttctattcttcccctgactcaacctttctgctccctcatgtcctctgcacccctcctcttctttgcttctcattctcatagctccctcccccttcttcccgtgctctcaattttctcaggggatcttgaccctttcccctactccagggtcctccttgtttcctagcttctttggcagtgtggattgtaggctggtaatcctttgctctaggtctaaaatccacacatgagtgagtacataccatgtttgtctatttgtgattgggttactgtcagaaaccagccttggcgaccccatacctagttagacgccagaaagtctggcatatcacaggagattccggatatctgcctgagaagcaactaacacctatcccctcccccatttccttagttggtgcctgagataaacacaggagattcaggatacctgcctgagaacaatgaactcatccctccccccacctcctttttctctgctcctcccttctctttaaaaagctccttggtttcaataaagttggccttgacaatggaacctgcttggtcccactccttctttctcgcccattatttgcaggcatgatccacctcggacccacgaattaccggagcctcgagggccggggcaggtggcgcccaaacgtgcggctcgaggtacggattcttcgccgaacggagacccccccccccaaggaaacctcggtagtgcacaccgacaaggaagttctgctcgccggattgcgacggacgctggtctgggaaaagttctcaccgctcatgagtgactgattccctggtaagtcgcccctcattccgttcgataatatgggccaaattgtctaaggaagtcaaacacttcctttcgggaaagaggagtttgagtaaaatgtaaggacttgattcagttttttgccttttgtcaaaaaaaaaaaaaatgtccatgggtcattttagaaagcccagacattcatccctaacttggaaaaaggtcggagaaggaccttaacagattgctcatagaaaagggacctgaggcagttccctcacagacttttagttacaggccttgagcctcattctcccaaaaactttaaaaattaccctgtctttagttcaaaccccaaaccaaaaacagatagttgaagcttagactacttaagtacaagagatttcagagtttaaacgttttaaaaggatccttcccgattacaaaagccactgccatgatgcagcattttgagttgtgcaggggcttaggaagactaggtgcggccttgcacacacgcaggccctcaggagatatctaggaatgtaatggagaacagaaaaatcctcgcctacttagaggtggctggatagcaaagaatatacaggacaaatgattgggatcaacagggagagacaattaataagtacctagatgaagggagccttcatctccttccttcattttaagctggaaatacagaaaggcaaatactcaatggtaaaattcaacaagagctaagagaattaaaaattttaacaaaatcgcttacaggagataagaaatttacgggtttcctggatcagagagaatggctcaggggaacatagcaggatacgtgtgccaataccattggaacagctctaggaactattaatggcttatgtccagtatggaccaatagaggctgatagggaatattactatagaagcctcacccctaggaaattaaaagcagataaccaaggcctgccggtcagcaggaggatatttgttatagagaccaggcagggacctagggagttaattaaaaattgatttctaggcctatatggaattttacaaaaatgttagacacacagatgttggaaactttgattataaaatagctagcctatgataatgttagtaatgcatgccagaccacactaaggcctcacaggaggaggattgatatagtgagttcgttaagaattgttcagatatggacctagctgacactcagggattattgatgatggctgccttacagaaaattcagttaaaaataagttattcctacacagaaagcaaggcacagggaggaagaaatgcacagagccttctagaggttgctttgggcattttcaaaaagagctccaggtcagacagagtcccaacaaaagaaagaattagggatcaggcttatgcccaaaatacagctacagatttttcagcagatagctaaggccaaggtcagccatggcagcagccgcggtctgccggccctcagccagcggcttggtaccaccttatgctggcgtctgcggcaggctagacaaaatggctgctggggcggtggacagtctgcctcctcgggataacttacaatcttgggaggtgccgccatggttgatggctacttgacccggcccgcggggctccggtaattcgtgggtccgaggtggatcatgcctgcaaataatgggcgagaaagaaagagccagaccaagcagattccattgtcaaggcccgtttattgatttatccaaggggtttttatagagaaaggaggaagcagagaaaaaggaagtggggggagggatgagttaattgttctcaggcaggtattctgaatctcctgtgtttatctcaggcactaactaaggaaatgggagaggggataggtgttagttgcttctcaggcagatatctggaatctcctgtgataagctagactttctggcgtctaactaggtatggggtcgccaaggctggcttctgacagctaattaatatatataaatactattgatacagtcagacaaaaactatttttgagacttatagagaaaaaaggacaacatatttaagcttagaattgttcaaattttggatgctcatatttcaatgattgactataagctactgtgttagaaatttcaattaaagatttttcttttcaacaaattgatcataacctaggcaaaaggagaaatgtgagactgtgagacgtatgcaagttatgaatgaacggtgtggccacacctggatgtgtgatgtgattgtgaatttatgaatgtggataaatgaaaatgcctaaattgccttggatatgattagagagatatttacattgcctcagatattttttaaataatatcaaaatcactttaacattgccaaaaggatcatccagtcagtcaatgtcttagcagaaaaatttttttgattttagccctaggtgacagtcaattaaaaagttagcaaaagcctataacattagcttagaggcatgaggattctacggatgattctgtaaaatttggcagatgagaggatacaggtcttactaaatttttatggttaaaaaaagaaatctagaaaattaaagttgatacatgattttaaaaaaggggtttataaaaagcctcaggaaagagccaacctgttagattcacagcttgaatgtgtcttttcatatgcaaatttaagccaggtcaaccaagatgcaaatgagatcttatcagcttgtcagccttgaaggttagattgcaaaatgctactcaaaaactctaaataaatctagagaattgttaaaaacatatgttatattcttaaaaaattaaggcttaatagatagcaattggaaaagatagtttaaaatctttaaataaattttttagaaattgttataaaatattcattggttaagtaccttttttgggacgtctaatgatgatttaaatcctttaagtaagattctataaggagataatgatccagatatacccaaacagctaactaagaaggtagacaagttctattattggaggaggcaattcaacatcaacagatatattgactatacaaaaccattactatggttcaccagcctaaatattttaaacccttattttaaaacattagcctatatgatacagaaatgccatatagattttaaaaagtaatttaggagaaaaccaagtatgatacatgtctcctactctaagcaacagtttaattgatggtttcagaacaataaatcataggcgattgcctttgctcaattttcaggaagaattgataatttctagctcatggactgttacaatttacactataaatccttttgcatttccaaaattatgaaaagcagtcccatacacagagtctagtaatagtcacgtcaaaatattatttaaacaaattcaaaatgttattcacctaagaattatcatgtttatgggtcacaatgggaacttactaaataggcctttccctgattactagccaaatagaataaattatctgattaacaaaattggttgatttgccttaagtagaaaaagctcaacaggcttctaactttcttcatcataatagcaagtctaagtaagaaatttggcttaaccagagagactgctggtcaaatcatcaaacaatatagaaaatgtccacaatatggctatagttaatttaaggataaatcctcaaggcctgatccccaaccatttatggcgaatggatgtgactcacattacagagtttggcaagttaaaaatgtgccactccacaaacaggagaagccaccaggcatgttataagtcactgtttaagatgttttgcttacatgggagtgccaaaagttataaaaacagacaatgggtctagatataccagcaaagatttccaacaattttgtgcttaattgcccagatcggtgctaccggaacagcccttatggcctagttccgcccagcgccgtggacctgcctgccgagcccgagcccaagcccatagcggcagggacggcggggcctttgggcccttggggacgcagcatgccgctgacttgggaatgaacccctgccttcgcgtttttatagcggcggtgagacttgaggcgagcccgcagctcaggcagcggcggctcctgagctggccggacgcacaggccaggcaatggtggcacatgcctttaatcccagcattcgggaggctgagacaggagttctaggctgtaatgcgctatgtccgcactaagttcagcatcaatatggtgacctccagagatggggcgaccaccaggttgcctaaggaggaggagttctataccatgcattgtctgtgctaaatttcctcatgtatgatgctacagaaaaatcagccttggattgcttctggcatccatgaacggctcaaaattatgctcaagccttatggaaagattccctaacttacaaatggcacgggccagatccggtcctcattttgggaaaaggacatgcatatatttttgatactcaggccaaatatgctagatggttgcctaaatgccttttttaatccacccaggggaagtccctgaggagccttctaattctgcttaattctagataaaagatgctgtttttttggctacttaggtgttcccaccttcgattgccgttgctgctggaagcccttatcagatctacaaatacacctggatgatcctctgacccgtccagcaggccaggttattcgcgggtctcgagggggttgtcacctaaaggggtcatgagggcgagagaggagggagaccttgcggcgcaagaaaggacaagagtccgtctgtgcaatgtcaaggtctccctcctctctcgccctcatgacccctttaggtgacaaccccctcgagacctgcgaataacctggcctgctggacgggtcaagtggcgcccaaacgtgaggctcgaggtacggtggtctccggacagcgccaagagaagaagaggctagccgacccaaaatggagacgccctgcatcgctcgtgcaccggtctgtctcgaggtaagtactgctgtcccattatcgtcatgggcaattcagcctctaaggaggccctctttatcagagaaataaagagtagtcttagggagagaggaagtagagttaagaaaaaggatctctttaatttttttttgttgttgttgttgttgttttgtggaggagaaatgtccttggctggtgattcatgggcctggcattcatccactaagttggaataaagtgggaaaggatattaatggtctcctcaaaaagggagaggagatcccagattccttctttagtttttatggagttatcagagatattcttaaggaatctgagacagagggaaaagttctcaccgctcatgagtgactgattccctggtaagtcccccctcattccgtttgataatatgggccaaattgtctaaggaagtcaaacacttcctttcgggaaagaggagtttgagtaaaatgtaaggacttgattcagttttttgccttttgtcaaaaaaaaaaaaaaaatgtccatgggtcattttaaaaagcccagacattcatccctaacttggaaaaaggtcagagaaggaccttaacagattgctcatagaaaagggagctgaggcagttccctcacagacttttagttacgggccttgagcctcattctcctaaaaaccttaaaaattaccctgtctttagtccaaaccccaaactaaaaacagatagtagaagcttagactgctcaagtacaggagatttcagagtttaaacgttttaaaaggatccttcccgcttacaaaagccactgccatgatgcagcattttgagttgtgcaggggcttaggaagactaggtgcggcctcgcatacacgcaggccctcaggagatatctaggaatgtaatggagaacaaaaaaaatccgcgcctacttagagatggctagatagtaaagaatatacaggacaaataattgggatgagcagggagagagagttaataagtaccaaattggagagccttcacctccttctttcgttttaagctggaaattcagaaaggcaaatactcaatggtaaaattcagcaagagctaagagacttaaaaattttaacaaaattgcttacatgagataagaaatttacaggtttcttgggtcagagaaaatggctcaggggaacatagcaggatacatgtgccaataccattcaaacagctctaggaactattaatggttgtgtccagtatagaccaacagaggctgatagggaatattactatagaagcctcacccctaggaaattaaaagcagataaccaaggcctgccggtcaagaggaggatatttgttatagagaccaggcagggacctagggagttgattaagaattgatttctaggcctatatggaattttacaaaaatgttagagacacagatgttgggaactttgattataaaatagctagcctatgataatgttggtaatgcatgccagaccacactaaggcctcacaggaggaggactgatatggtgaattcattaagaatttttcagatatggacctagcttacactcagggattattgatgatggctgccttacaggaaattcagttaaaaataagttattcctacacagaaagcaaggcacagggaggaaaaaatgcagagagccttcgagaggttgctttgggcattttcagaaagagctccaggtcagacagagtcccaacaaaagaaagaataagggatcatgcttatgtccaaaatacagccacagatttttcagcggcccagagggcatggtcgagctaaggccaaggtcagccagccatggcagcggccagggtctgccggccctcagccagcagcttggtaccacctcatgctggcatctgcagcaggctagacaaaatggctgccgggctggcggacagcctgcctccacatggtaacttccagccttgggagatgccgccatagttgatggctaattaatactgaaggaaccggcttcccttttggcagccataatggttaaacatgtgcctttatgaccttgtcctaaaaaccagaaagtcagatgcctgtctcgtgacaaggaaccaatcagaagttagctggtggcgctatgctttatggctctgggtgtgctttacggacaagcgcacagcaatgacgtagagagcatagcaaccaccctgggagggcctatgagccataacaaccagttgaccaatcaacacagggcaagccctccaagcctggaggcacaccaatcatgagcctgtgcgtaagcctgtgcgtacccctagacactccccttacgctgccctataagatctttggggagaccttaggagccgtctttttctagccgtctgccatggcgggtgggtgaaagacccgagctaacatggggttagttcgttaaattacaataaagcctcgtgcagtttgcagcaagctctcgaatccgcctggtgattggggtgaccgcgaacctggcctgagaccccggatacttgagttttcgggggtctaacaaatacatatataaatactattgatacagccagacagaaactttttgagacttatagagaaaaaaggacaacatatttaagcttagaattgttcaaattttggatgctcatatttcaataattggctatagctactatattagaaatttcaattagggatttttcttttcaacaaattgatcataacctaggcaaaaggagaaatgtgagacgtatgcaagttatgaatgaacggtgtggccacacctggatgtgtgatgtgattgtgaatttatgaatgcggatgaataaaaatgcctaaattgccttggatatgattagaggtatttacattgcctcagatattgtttaaataatatcaaaatcactttgacattgccaaaaggagcatccagtcagtcagtcaatgtcttagcaaaaaaaaaaatttttgattttagccctaggtaacagtcaattaaaaagttaacaaaagcctatagcgttagcttagaggcatgaggattctatggatgattctataaaatttggcagatgagaggatacaggtcttactaaatttttatggttaaaaaaggaaatctagaaaattaaagttaaaacatgattttaaaaaagctttataaaaagcctcaaaaaagagccaacctgttagattcacagcttaaatgttttttcatatgcaaatttaagccaggtcagccaagatgcaaatgagattttatcagcttgtcagcctcaaaggttagattagaaaaggctactcaaaaactctaaataaatctagaaaattgttaaagatatgttatattcaaaaaaaaaaattaaggcttaatagataacaattagaaaagatagtttaaaaatctttaaataaattttttaaaaattgttataaaatattcattggttaaatgcctttttggggacatctaatgatgatttaaatcctttaagtaaaattctataaggagataatgatccagatatacccagacagctaactagaaaggtagacaagttctattattggaggaggcgattcagcatcaatattgactatacaaaaccattactatggttcaccagcctaaatattttaaacccttattttaaagcattagcctacatggtacaaaaatgccatatagattttaaaaagtattttagaaaaaaaaccatgtatgatacctgtctcctactctaagcaacagtttaattggtggtttcagaacaatgagtcataggcgattgcctttgctcaattttcaggaagaattgataatcagtttctagctcatggactgttacaatttgcactatacatccttttgtatttccaaaattgtaaaaagcagtcctataaaaatatgttaatttttaccaatagattattgggagagttacttacataggtttttaatagaaagaaatagataaaactgacagctctggcttcagctcaattaatcaaactgcaagctgttacaatggtcttttaaatcctggtagataattcatttactttgtatactgacagtcactatatatttaaggcttataaggtaacaaaaacagtcccatacacagggtctagtaatagtcaagtcaaaatattatttaaacaaattcaaaatgatattcacctaagaatcatgtttatgggtcacaatgggaacctattaaataggcctttccctgattactagccaaatagaatgaattatctaattaacaaaattggttaatttgccttaaatagaaaaagctcgacaggcttctaactttcttcatcataataacaaaagtctaagtaagaaatttggcttaaccagagagactgctggtcaaatcatcaaacaatataaaaaatgtccataatatggctatggctaatttaaggatgaatcctcaaggcctgctccccaaccatttatggcgaatggatgtgactcacattacagagtttggcaagttaaaaatgtgccattccacaaacaggagaagccaccaggcatgttataagtcactgtttaagatgttttggctgcatgggaatgccaaaagttattaaaacagataatgggtctggatatactagcaaagctttccagcaattttgtgcttaattcccgagactggtgctaccagaacagcccatatggcctagtcccgcccaatgcacgtggacctgcctgccgagcccgggctagcaatggcggacagctgggcccttgggacatggcatgccgctgactcgggggaatgaagcgcctgcctctgcgcttctgtagatccacacttctgtagacatgagacgagcccacagcccaggcagcgatggctcctgagctggcagggacgcaggggccgggcccgatggcacgcctttaatcccagcactcgggaggctgagacaggagttctaggctgtaatgtgctatgtctgcactaaattccgcatcaatatgatgacctccagagaatgggcggccaccaggttgcctaaggaggaggaattctataccatacattgtctatgctaaatttcctcatgtatgatgctacagaaaaataagccttggatagcttctggcatccatgaacggctcaaaattatgcttaagccttatggaaagaccccctaacttacaaatggtacggaccagatcctgtcctcatctggggaaaaggacatacatatatttttgatactcaggccaaatatgctagatggttgcctaaatgccttcttaatccacccagggaaagcccctgaggagccttctaattctgcttaattctagataaaagatgctgtctttttggctacttatatgttcccaccttcgattgccattgccactggaagcccttatcagatctacaactacacctggatgatcatcaaccctgccaatgatgctgccaactgatgctgtcaacgccttcagaactattgcgaccaccccctccttccccccccatagttgacttatatactttagccttaggggcctctccagactagggaacccctgaccatttttccccccaggagctcccttttccgctgaccttattctatccttaattaaccctactgttcaggccctccatcaagccagccactcccttatagaggactcttgggtctgctattcttccacccctcccttttctgagggaattgcaggcatttaatttctaccttgccagttctactagattgactacttaaactgtcacccttaccttttcagaaactaaccagattcattaagtaccagattgacgccatcctcgaaaaaacggttttggttcactaccatcgcctagcggcattagattctgagctgcctgacgataataaccctccccccagtcctaaaggactggatttttcaggccttgaacatcgaacctcccgatttccttggccttggagccgtccatgacgggaaatatcgtggtgccgcaagccagatgccgacccttcccaacagctgtagcgtcctccatgacgggtttagcgtgagactgaccccccttcaaaacctgtaggcccaaatccggtcctccccgatcgagggataaagactctgcctaagcccgctcaaactcctgcccagtcatctacccctaagcttaccccaattaccccttctattagcccggatccaggcactgtagatagattattctatttggtacagggagcctatctagcactcaatgcatccagtcctaattctactcgagattgctggctctgcttgtctgctgagcccccctattatgaagggattgcctttatggccagtacatccaatatcacctccccatcagcaaggtgcagggctgtccctcaccaacttaccctgcccggagtttcaggacaagggctttgtttaggaaaggtgccctccagttacacccagttttgcaataaaactataattccctatataggaagctactatcttgaggcacccaatggtacctattgggcttgcaacacaggattaacaccctatatatttgctttaagccttgatgtttcacatgaatattgcattttggtacagctttggcctcaaatcaaatactattcaggggagatactggtctcacaggcacagcgcagagtgatgagagagcctgtctctatgaccattgcccttatgcttgggattggtggccttgttgccggtataggaaccggaacagctgcccttgtacaaaacaatcaactgttgcaattacaaatagctatgaacacggatcttgaggccatagaaagatccatcagtgctctggaaaaatcactgacctctctatccgaggtggttttgcaaaatagaagagggctggatctcctgttccttaaggaaggtggcctttgcgctgctttaagggaagaatgttgtttctatgctgaccatactggcattgtcaaagagtctatggaaatcctgagagaacggttggctaaaagaaagagagagtttgagaaccaaaaaggatggttctcaaatttgctacagggatccccctggttgtctactttactcccaactattatagcccccttaattgttttcctattgcttctttcttttggcccatgggcccttcaacggctaacccagcttattaaaagacaaattgattcggccttacctaaaagtatttcggtccattaccacaaattagtagcagctgacccgggggaggagcgagggtcgcagcaagagctcaggttcagtaatcaaggactcaggtttaataactcaacatgctaagattgatgcagcaagggagcactcaatgacgggagtatgcataggtcctggaacaggggtcaacaacgtacagaggtcgtcaagaccggctcaacaaggcacgttgcctgtccaggggcgcagcctatgtggcctaagacaggggctctcttgataataagattcatcatccctttttgtatacagaagggggaattgtcgagggccaaaaggggcctcatactgagtcaagagttaatcattgttagatgaccagaatcgctgcgactacaagatgttttttccggataagctgcactatacatgttgcaaaatgttctcccttttctcagaaatagctgcggttcgctaacaatgggaccatgggctaagatttaccttgcctctatttcctcttgaaaattttccattcctcctgctcccttaccccgccctgagtaaaaatcccctgcatataagcaggctttacctttcaataaacgagaccttgacattgcacagacggactcttgtcctttcttgcgccgcaaggtctccctcctctctcgccctcatgaccccttttaggtgacaaccccctcgagacccgcgaataacctggcctgctggacgggtcaatcctcaaccgagccagtgatgctgccaatgcttcacaactattgcgaccaccccctcctattcccccctgagagttgacttatgtgctttagccttaggggcctctccagactagggaacccctgaccatttttccccccaggagctccctcttccactgaccttattctcttcttaattaaccctactgttcaggcccttcatcaagccagccactcccttatagaggactcttggtctgctattcttccacccctcccttttctgagggaattgcaggcatttaatttctaccttgcctgttctactggattgactacttaaactgtcacctctaccttttcaaaaactaagcagattcattaagtctcaggtccactaccattgcctggaggcattagattctgagctgcctgactacaataaccccccccccccagtcctaaaggactggatttttcaggccttgaacattgaacctcctgatttccttggccttggagccgtccatgacgggaaatatcatggtgccgcaagccagatgccgacccttcccaacggctgtagagtcctccatgacgggtttagcgtgagactgacccccagatgcccactccaaagcactcccgagctgctagccttatgaagggtcatcggaatgctggggacaggtgcatctcatgtatcctaagacagaggcactacccctcactgtcatataaatgacaatatcataaaacatagggtcctggatgcgggtgcccatcacgtagcccaagccagatgctccattttattatacttaatagggggagatgtcagaagccagccttggcgaccccatacctagttagacgccagaaagtctggcatatcacaggagattccggatatctgcctgagaagcaactaacacctatcccctcccccatttccttagttagtgcctgagataaacacaggagattcagaatacctgcctgagaacaattaactcatccctcccccacctcctttttctctgctcctcccttctctttaaaaagctccttggtttcaataaagttggccttgacaatggaacctgcttggtcctgctccttctttctcgcccattatttgcaggcatgatccacctcggacccacgaattaccggagccccgcgggctggggcaagttacctcgctcagattggtttcttctagttccatccattttcctgcacatttcaagattccattttcttttccccgatgagtattaatccattgtataaatgtaccacattttctctatccattcttccggccttccggctttcagagtctcaatggaaaagtcaggtgtaattctgataggtttacttgacctttttcctttgctgctcttagtattttctctttattttgtatgtttggtgttttgattattatgtggcaaggagcccttcttttttgttcagtctatttggtgttctgtattttcattggcatgtctttctttaggttgggaaagttttcttctatgattttgttgaatatgttttctgcgctgttgagttggatttcttcaccttcttctatacctattattcttaggtttggtcttttcacggtatcctatatttcctggatattttgtgttagggatttgttggacttaagattttctttggttgatgattctatttccactagtgtgtcttcaactcctgagattgtctcttccatctcttgtattctgttggttatgcttgcgtctgtagttcctgatcatttaccaagcttttctatttccagcattccctcagattgtgctttctttattgtctctatttcagtttttaggtcttgaactgttttcttgagagagatttgttgatatcttatttttttggtttgtttgttttttccttttctttaagggattttctcaagtcctctttgaggtcctctatcattttcatgaagatgtttttaaggtcattctcttctggttcatctgcattgtgatgttcaggtcttgctggtgtatggttcctagtctccggttgtgtcatattgggttttctgttgttgaatgtgcttttacattgtcttcttctcatcctttcttctgatgggtgtagcaggagtctcttcctctcctggtgggcatgggaccaaggttcccttctggtagatgcaaacagaacaaatactctgatgcctttcctcttctggtggatggaggtggtgttagacccccggaaaactcaggtatccgaggtcccaggcccaccccaatcaccaggcagattcgagagcttgctgcaaactgcacgaggctttattgtaatttaacgagctaaccccatgttagcttgggtctttcacccacccgccatggcggatggccagaaaagacggctcctagggcctcccaagagatcttataggacagcgtatggggagtgtctagcggtacgcacaggttcactattggtgtgtctccaggcttggagggcttgccctgtgttgattggtcaactggttgttatggtccataggccctcccagggtggttgttatgctttgtgtgtcattgctgtgcgcttgtccgtaaagcacacccagagtcataaagcatagcgccaccagctaacttctgattggttccttgtcacaagtcaggcatctgactttctagtgtctaggacaaggtcatagaagcatgtgttcggccattatggctgccaaaagggaagctggtcccttcagtggcactgttaccggggcttcagcagtgtccaggtgtgttggatcccgctgctgagtttggatccggatctcttcaaaggtacctttaatctgtcctaaagctatgaactttctcctcacacaaaacacacacacacacacacacacacacacacacacacacacacacacacacgtagttttagtacgtctctacattaaaagcatactcataaaataacttttgtattcttcatgttgtgtcatcttcttttacctatcatactttagaacacaatgtattactcatgctttggttttactattatatttatgatatttatgttctggattataatatgcatttttggaactaatttgggatttgctaaaaatagcattttaatacttttttcttttcttttcttttttaattttaattagaaagaagattattttacatgttaattccaggtccctctccatccccttctcccctgccctccccaactaatgccctacctatcccatatcctatctgctccccagggagggtaaggcctttcgtagggggtcttcaaagtctgtcatatcctttgagatagggcctaggccaacccccttgtgtctaggctcagggagtatccctccatgtgggatgggctcccagattttagcaaatttgctaaatcttgtttacacataatacagcagaataaatcaatgcatttttgtatatttacccacttttgtcataaaggaaccggcttcccttttggcagccataacagccgaacacgtgcttgccataatcctgccttggtcacttagaggtcagatgcctgtctcgtgacaaggaaccttagtcacttagaggtcagatgcctgtcttgtgacaaggaaccaatcagaagttagctggtggtgctatgctttacgaccctgggtgtgctttacggacaagcgcacgacaatgacgtaagagcatagcaaccaccctgggagggcctatgggccataacaaccagttgaccaatcaacacaggacaagccctccaagcctggaagcacaccaatcgtgagcctgtgcataagcctgtgcgtacccctagacactcccctacgctgccctataagatcttttgggagacccaaggagccgtcttttctagccgtccgccatggcgggtgggtgaaagccctgagctaacatggggttagctcgttaaattacaataaagcctcgtgcagtttgcagcaagctctcgaatccgcctggtgattggggtgaccgcgaacctggcctgagaccccggatacttgagttttcgggggtctaacaacagtttattgagagatccatttaaatagtcctctaagggcagggacaacatcaggaagcatttatcacaatgcatattgctaacatcaagtgattctgttgcctaaacaactcttggtcaagcaggcagagtcttgagcccaggtatgggcctacccaaggcttaagctacagagatgcaaattaggaggcatatttaccttcggccacggtaaacagttacagcctggtgtaaattaacaatacaatggcaactcggagctccctggcaccactgctgtttatgtcagccagagcctggaacccagaatattccatatcagggatatccggtcccccacaaactcctgggcaggttctctggcccgagaaattgaggccacaagccacacctgcaaactaaaacagggagattctataggttataggtgaaggtgcctgccacaagctgggtttgtgcccagatatgggcaaaagcttgggctaggacttgagcggttggcaacttcaggagcggaagatggagtagcctccaaaaatgcagaactggtctcttctggcacctttcctttgttcagagattgtctgagcaggtggggtttggaaagagagagagagagagagagagagagagagagagagagagagagaggaccttttagaccatgctggggcaagcttcaactaaacagatatccttgagctttgtgccctctagaaattcagaataacatccctgttatcctccttcctctggctttctgaactctcgtttttatcacttaatagaaatttcaaccgtggacccttcccaccaccggaccccgcagagggacctgaaggcagaccaaagcagccagtttcatgggcagctattctggtcttgcccctccaccctccagctgagaggttaaggagagaccccacctatactcactggaagaagagatgggaagacaacagcataagaacacatccagcaacagaaagacttatataacaccaccatagtctagggactctacacagcaagacctgaacatcccaacacagatgaagcagaagagaatgaccttaaaaacaacctcatgaaaatgatagaggccctcaaagaggatatgagaaaataccttaaagaaatggaagaaaaaacaaaccaaaaaatgcaagaaatcaacaaatctcttaaggaaagccaaaaaaaaaaaaaaaagcaatcaaatagctgaaggaaacaattcagacagttcaagatgtcaaaactgaaatagagacaataaagaaaacataaactgagggactgctggaaatagaaaagctgagcaaacaatcaggaaccacagatgcaagcataaccaacagaatacaagagatggaagacagaatctcagatgctgaagataaactagagggaatagattcatcaaagaaaatcttaagtccaacaaatccttaacacaaaatatccaggaaatatgggacaccgtgaaaagaccaaacctaaggatgataggtttagatccagcatttccactcctaggcatattcccaaaagatgcatattcccacaacaaggacatatgttcatctatgttcatagcagcattatttgtaatagccagaacctcgaaacaacctagatccccttcaactgaagagtggatagagaaaatgtagtacatttacacaatggagtactgaaggaaccagcttccctttcggaagccataacggtcgaacatgtgcttctatgaccttgtccgagacactagaaagtcagatgcctgacttgtgacaaggaaccaatcagaagttagctggtagtgctatgctttatgaccctgggtgtgctttacggacaagcgcacagcaatgacatagagagcatagcaaccaccctgggagggcctgtgggccataacaaccagttgatcaatcaacacagggcaagccctccaagcctggagtcacaccaatcgtgagcctgtgcgtacccctagacactccccttacgctgccctataagatctttcgggagcccctaggagccgtcttttctggccatccgccatggcgggtgggtgaaagacccgagctaacatggggttagctcgttaaattacaataaagcctcgtgcagtttgcagcaagctctcgaatctgcctggtgattggggtgtactgcgaacgtggcctgggacccccggatacttgagttttcgggggtctaacagtactactcggcggaaaaaaaaataatggaatcttgaaatttgcaagtaaatggatggcactagaagaaaccattctgagtgaggaattacataaagacaaaaatggtatgtactcactcatatatggattttagacatggagcagtggattaccagcctacaatcccacagccagagagtctgggaaaccgggaggaccctaagagagacatgcatggtaccctggagaagggaaagggaacaggatctcctgaccaaattgggagcatggggggaggggagaaggggctgggataaagagagggggagaagaagaggggagaggaggatggggagagtaggaaggttgagttggggcaagaatagaggagggcaaaataagagatataatagagggagccattataggtttaaagagaaatctggcactagagagatttccagaaatctataagaatgacaccaactggcaatttaagcaacagtggagaggctaccttaaatgcccttcttcaataacgagattgatgactaccttatatgccatcctagagccttcatccagtggctgatggaagcagaggcagacacccacagctaaacactgaactaaactcctggaactccattgcagagagggaggagtgataagcaaagaggtcaagattggtctggtgaaacccgcagaaacagctgacctgaaccagggggagctcagggaccccagactgatggctgagaggccagcatgggactgatccagaccccctgaatgtgggtgtcagtgaggaggcctgggcaatctatggggccttgggtaatatatcaatattcatacctggcacacaaatggactttgggagcccattccacatggagggatgctctctcaatctggacatatagggagggcctaggccctgcctgggatgatataacagactttggagatcccccagggagggtgaggccctccctggggagcagagggggatggggtggaggtttggggggacaggtggaggatgggggaggaggggagggagagggagcaagctagttactaatttaaataaaaaataaattacaaaaagaaaaatttcaactctcaggagaacagtgcaaggttcaggatagactgaaggcattgtgaaaaggtttctaattaaaatagatatatgaatgtggtggtttgaataggaatggtccctatagaaacacgtatgtgagttcttggtccataggcagtggcattattaggaagtgtggcttggttaaaggaagtgtgtcaatgtgggggcaggctttgcagtctcatatgctcaagctacctccagtggggtacacagtctccttcagccgcctacagctaaagatgtagaactctcaaaccaccacagtggccacaatgaaaataagaattaaaggtgtctaattccccaaagcctgtctttatgaacaatgaaatgaattttaggtttaaataaatggaaagagatatgcaccactacacagtccaggacaaagtgtgttcctgcccatcactgaccaatcattgtattagcttcaccatcttacagagcagttagttgttagtaggttataaaacctcttcctgtgagggagggtcctcctctggctgacaccaagtttttagcttcctactcataggattcctgaagaaatttgattgagagaggaccattgtttcaatagtctgatagcaaaaagtaaagggtgcaaatgtttcttactacaaaatccttgttctgtccggtggttactctctgagtctgcctttacccaatagggaggtgggggagatcaggcctccttgagtacataatcctgtatagctgccaaaggtctgtctacttagagcaaacttctaataggtattaataatacaaactcagagtcagatacagggtaaatgctgaaagatcagagagacaaaggagcaaggcacagccacctcttaccccactgtcccgtccctcgggtcagtcattcagggttccggaggggggctgcctgaaaaaaagtcatgggtgggagaaggaaggaagccaagcagcgcaaaagaggggactagagtccatctgtgcattgtcaaggcctccatttattggagttcagactgggcttatatagccctgcaacaaggaaattaggcaggcgggggataacaggaaggagccggagcattattcttatcagccggaatatcttgtgatcttccccagaacagcaaacaggaaagccccaggccctttctcggaacagaagcaattaccagttccatgtggccaaaccatctaattacaggttacaggaggctcataaaagggtttacagagatgggctttaaaacccatagtgtagggcccatggcccttaacaccccacaacttctcagcccaaaagggccaacctcctgtctctgctctgctttatcacttcctgtctgcctgtacagacctccagacctctatggttaactagtacctagctctgccctctgatctccagacaagctttaattgttaaagcacaaaacaaaatatcaccacactattcaggggtggtaatctgacttttgttttggggttgttgacttttgttttgggggatgtttgtttgtttgtttgagaaagagtttctgtgtagccctggctattctggaattctctctgtaggcctcaaactcacagagattcacccagaactgacttttggttgatagggcttggtatgaaaacaaaggaacagaaaacagtcttagcccaagaaatctttgatggaccagcttgactccatcttaaagatggaagtcattttgttaaaggatcagaataagttcatttctgttcactgaaaatttcaagttgactgtgctttaacctgtttctgtaatttgacaaggttcccaccccatggagtttgactcacaccttgaagtacccttataagataagggtttctgccaaataattttgaaatgttcagtcattctagcctagcagttttaaggactatataaaccccacattctgagatgtttgatgctattttctcaaaccatgctttgaggagatagccatgtctgacagaaaatgaagcctggataatttgaccaaagaatttaggtaatggtctttacaccttcctccttccacaaggcgtccctgggcacacatacatttggagtgtctattctgaggagggatgtgcttcttcaaatctaaaaactataaaaccaaggctaggagaaactacacaaaaaggatcagcagcctgcccagggatgaatcagctaactgtgccttagaactgcagctgtcaaactccctggggtcaagatatgcctacagggagggctgtagacacttggtgtgtaatgtgcaagcagattgatctaatcatgtgaatttaaagagaaactggagtgtttgctcttggcagaccctctcaattactgcctgccttcaacaaggtaattacaatgatagtgtttttgaatatttatattattcagggttctacagagtaacaacttatagaattaatactctctcatacacacacacatacacacacacacacacacacacacacacacacacacagagagagagagagagagagagagagagagagagagagagagagagagagagagagaattatttacaggccatgtggtcaagctaatctcccacaatggctggctgttcacagaaaatccaagattccagaagttgctcagtccacaagggtggatgtctcagctggtctccagtagatgctagaatcctgaagaagtaggttctaatgtcattgaaggaatggattttctagtgagggtgatagcaaccaggcaaaaagcaaaagcttctgtggtggtttgagagaaaagggcccccaaagggctggcactgttaggaggtgtggctttgttgaagtaggtgtgactatgttggaggaagtgtgtcactgtggggctaggctttgaggtctcatatatgctcaagcttcactcagtgtgacagtcagaccatttcctgttgcctgcaagacacaggactctcagctccagcaccacttccgcctgcatgctgccatgcccctgtgatgataatgtactgaacctctgaaactgtaagcaagacaccccaattaaatactttcctttataagagttgccactgtcatgtggtctctccacagtaatagaatccctagctgtgacagatttcttcttccatgtctttatacaggcttacagcagaaggtttaacccatattaatagtgtgtcttcctgcctgaagatccagagcgaaggcagtgtcttcacacatcaaagaaccagattagaagtcgatcttccttcttcaagttaagcaaaatctccctacttttggattttaattgcagaagtgacaatcaagaatagccatagcaagttcctactaaagcagatactttgccagaactttcacgtatatgatcttgttcaaactgggtgatcccaatgaggacacccataaaccctgcttccattttatggaagagaaaagttaggtccagggttgtagatgtaactcaaatggcagggcactggcatggcacgcaaagctgtgagtgtggtctccagaactgcgtaaatagagggtagtggtagatgattatgtggtggaaaggggaggattcagaagttcaaggtcatccctgaccacctgctacacagtgagtttaaagccaggctgggctacatgagaccatgccttgcaaacaaacaagaaacctccaaagttcatagaaagcaaaaagacacctattagagaggctcagatcctatctcggtgggatgggatgtgtttaggaatcttcacacctacagtgagagcagaccgctggagtcagggaggcccagaagatctgcacagggctctcagtagcaaacattttaaagataagaagagggggctggactggtgcagccatggtacctacagaagatactgaaaaccccctccctttctactacttggtgtggagtactcagcattcagcacttggcacttaatggagcagacgccaggttagaaaggtccctaatgtattggtgacttaacaacccaggatgctctgtagaccacactcttgggaaactcagggcaagttttaagggacgatttgcataatacagctaggctgtgggaataaaactttgactcagaaccatgcagtgtcccgcgcgctatgttctcgccggcaagaatcacacaggacactcggatccttctgcaggaaagctttaatgcatcttgagagtgggagagcataagcttaccagagcggagaccctgagccaagaatcccgttccttaataaaggctggcagcagtcgcctgggacgtgttaccctatgaatggcttcagctcctcaggccaaatgagccacgggataggcagagatcaaaggaatggaaattacccagcgcctgcgaaataatttacattcggtgcctgcaggcaccatcattgtaatggagaatgcaggaacggctccctacaatgcagcattcagcaagctgaaatctggggagccagaggctataaggaaccttcatacaggctccaaacagtaccctaaacatcagggaaggggcagcattcacaaatagactcttgcagaactgttcagaggtatagtatcttagactctacctgtaaataacacacagagatttgtcttagtttatgtttctattgctgtgaagagacaccatgaccaaggcaactcgtgtgtgtgtgtgtgtgtgtgtgtgtgtgtgtgtgtgtgtgtgtgtgtgtgtgtgtgtgtgtttcaagacaggggttttctgtgtaactttgtagaccaagctggtcttgaactttcagagatctgcctgcctctgcctcccgaatgctgggattaaaggcatgtgccaccactgcccacctccaaggcaactcttataaagaaaacagttaattggggtggattatttacagtttcagaggttcagtccattatcatcatggcatagagcatggtggttgcaggtagatgtggggctggggtagtagctgagaatcccacatcttgtaggcaacaggaagtcaactgagacactgggtggtatcctgagcatagaaaaccccaaaacccacctccacagtacacccttcctccaacaaagccatgcctactccaacaaagtcacacctcctaataattctattccctatgagattatgggggccagttgcattcaaactaccacaagacccaatcaggatctgcaatgcagtttcccaaagatagacccaaagacaagaaaaagcaccatccatgagtatgtcaaaacctgaaacctgagtttacaaagaattcccaaggatgagttgggcttctgagaggctaggaagggatacagaggctcaaaaactgaatcgagcaaacaggccaactctgttcttgttcccatcttcctccttcttcctcttccttctcctctccttctccttctgcttctacttcttcctctttcattttcctctcacaaagtacatgctgtgtctgatttgtggcttctctgtgactcatctcttgggggttagaactattctagatgatctgctcgttttcatttccctctctctttcacgtctacctttggccaatctgactcatctggccacagtgtattgtgcatgagtttacattctgtttgctttcttctctgtattttctctatccacccaatctaatcactagtcttactctgcatttttccttttcattcacatccacaatgactaataaatgtatttgtgcacatagtactgtcagatacctgcctttattccctaaagttattgatgtttaagggagtgatttattttttgtctactattactgtattgatagtgattgttgttgtagatagtaatctaccatcaggatagcaatggggattgagcctggtgtcatgaatactggtctagcagaggaaaatgacacatcagccctgttataacccaggctctccagaacattacaatcacatccaccaaaagaagaaagatgactaaaaattggcatagacttagacttcctagggaaggctatatgctttctgtggagcagatgggagtagggggggtgtagggagagtaggaggagaggagggagggggaactggaattggaaggtaaaaaataaattaataaaaaagtgtaaaaaaattcaatcaataactaaccgtaaatatacaaatcccagtgcaaaaatacaataaacataaaagaaggtagcaagttttcttcaccagcctcacagcaacacctgcaatgagaatgagttagatgaaattccagatgaaacattaaaaataatgatcataaataaatttaaaatatcaaaaggacacaaactcctgaataaatgtcaagaaaatataacaaacagctaaatgaaaagggggaattgatacatgataaaaaattgaaattcaggcctgaggtgaatctgggcactgctctgcccccaacttcccccatcactcactgctcgcttctacctgagtctccctcaggaaaagagtggacctgcccagacgggaaggcccaccctgagtccagacacacctcacccttgtccccccaccaccctctgccctccgactgctgcctgagggatgggaagaagacagagtaagaacacactcaacaacagaaagaccaatatgacaccaccagaatctaaggactccacaccagcaagaactgaaaagcccaatgcagaggatgaagaagagatggaccttaaaaattatcttaggaagatgatagagaccattaaagataaaacaagaaaatcccttaaagaaatagaagaaaaagaaacaagcaaaaaattacaagaaatggaggaaaagaaaaaccaaaaagttcaagaaataaagaaatctctctctctctctctctctctctctctctctctctctctctctctctctctctctctctctcggttcctccagacagggtttctctgtggctttgaaggctgtcctggaactagctcttgtagaccagggtggtctcgaactcacagagatccgcctgcttctgccttccaaatgctgggattaaaggcatgccaccaacgccccacaagaaatctcttaaagaatctaaagaaagccaagaaaaaacaaccaaacaaatgaaggaaacaattcaaacagtttacggtttgaaagcagaattagaaacaataaggaaaacataggacaaggaaatgctggaaatagaaaagctgggtaaacgatcaggaacctctgatgtaagcataaccaatagaatacaagagatggaagagagaatctcaggtgttgaagactcgttagaggatatacagtcatcgaccaaagaaaatctcaagtccaacaaatccctaacacaaaatatccaggaaatatgggacacggtgaaaagaccaaacctaagaataataggtatagaagaaggtgaagacatttagctcaaaaatacagaaaacatattcaacaaaatcatagaagaaaacttccccaacctaaggaaggatatgcctatgaaagtacaagaagtgctgggcattggtggcgcacacctttaatcccagtactcgggaggcagaggcaggtggatctctgtgagttcgagaccagcctggtctacaagagctagtttcaggacagtctccaaagccacagagaaaccctgcctcaaaaaaccaaaaaaaaaaaaaaaaaaaaaaaaaggaagtacaagaagcttacagaacaccaaataaattggaccgcaaaaagaagtcccctcaccacataataatgaaaacaccaaacttacaaaataaagaaaaatattaagagcagcaaaagaaaaaggccaagtaacatataaaggcagacctatccgaattacacccgacttctcaatggaaactttgaaagccagaagatcctggatacatgttctacaaacgctaaggaaacttggatgccagcccagacaactgtatccagcaaaactttcaatcactatagatggagaaaacaagatattccatgacaaaaccagatttacacaatacataaccacaaatccagccctacaaaaattactgggaggaaaattccaatgcaacgaagataactacactcaaaaaaccataggcaatagataatcccactttaccaaacaccaaaaaacaaaaagtggggaaatccacacataataataccaacaacaacaaatcaaaaacaaacaagaatgaacaatcaatggtcattaatatccctcaatgccaatggtcttaacttgcctataaaaagatacaagttaacagaatggatatgaagacagaatccatccttctgctgtatacaagaaacacatctcaatgtcaaagacaggtgttacctcagagtaaagggttgggaaaagactttccaatcaaatagacccaagaaacaaaatggtgttaagatattgagtatggggaagaatagaggagagagagcaggatgagagacaccatattagagggagccactatcggtccaagaagagatctggactagggagatctccagagacctacaaggatgacacgatctgacaatccaggcaatggaggagaggataaccaaaaatgagattgatgactactctttatgccatcctagagccctcatccagtgactgatggaagcagagacagacatccacagatatacactgtgctgaaatctggaatttagttcaagagagggaggaatgaagatcgaaggggtctgtactaggttggagaaacccacagaaacagttggcctgaacaagggagagcacattgaccccagatgctatctgggaggccagtacaagactgatccagccccctgaacatggatgccaataaggaggcccagcacaggaagatttggtggactttgcagagcccctgttgagggccttaccctgcctggggagtggtgggtggatggggtagggggtaggttgggagtgggggagggagagggagaagggacttacatgtgaaacaagcttgttccctaacttgaattaataataataaaaagtaagatggtgtagcaatcctaatatctaacaaattaaacttcaaactaaagtcaatcaaaagagatgaagaagggcatttcatccttatcacaggaaaagtccatcaagatgaagtctcaatccttaacttctatgctccaaatacaaaggcacctacatgtgtaaaagaaacattactaaagctcaaaccacacataaaacctcacacacttatagtaggagacttcaacaccccactctcaccactagacaggaccaccagacagaaacttaacaaagaaacaaaagaactaacagaagttatgacccaatagggtttaacagatacctatagaacattccatccaaacacaaaaggatataccttctcagcaccacatggaaccttctctaaaattgaccacatactcagcaacgtagaaaacctacacagatacaaaaaaaaaaaaattggaataatctcctgtatcttatcagaccaccatgctttaaagttagaattcaataacaacacaaattgcagaaaccctacaaacccatggaaattaaataacgagcaattgcaccattcctggattaaggaagaaataaaaaaaagaaattaaagacttcctagaatttaatgagaatgaagacacaacatacccaacttatgggacactttgaaagcagtgctaagaggaaagttcatagcactgagtgcccacatggagaaactggacaatagtcacactagagaattgacagcacacctgaaagctctagaacaaaagaaagcaaactctccctggaggagtagacaccaggaaataatcaaactgagggctgaaatcaataaagtagaaactaggaaaacactacaaagactcaatgaaacaaagagttggttctttgagaaagtcaacaagctagacaaacctttatccaaactaaccaaaaggcagagagagagagagcatgctaattaacaaaatcagaaatgaaagggggggcataacaaaagacactgaggaaatccagagaatcattaggtcacactttgaaaacctgtactccacaaaatttgaaaatctaaaggaaatggacaattttctggatagatatcacttaccaaaattaaatcaagaacagataagcaatttaaacagacctataacccataatggaatagaagcagtcatcaaaagtctaccaaccaaaaaagccgagggccagatggtttcagtgccaaattctaccagaaattcaaaggagagctaataccagtactactcaaattgttccacacaatagcagcagaagggacatcgccaagctctttctatgaggctacaattaccttggtaccaaagccacacaaagacaaaacgaaaaaagagaattacagaccagtatccctcatgaacatcaacacaaaaatattcaacaaaatactggcaaatcgaatccaaaaacacatcagagaaatcatcctccatgtcaagttggctttatcccaggaatgcaggatggttcaacatacaaaaatccatcaatgtaatccaacatataaacaaactgaaaaagaaaaaccacatgatcatctcgctagatgctaaaaaagcctgtgacaaaatccaacatcccttcatgataaaggtcttggagagatcagggataacaggaacatacctaaacatgataaaagcaatatacagcaaaccaacagccaacatcaaactaaatggagagaaactcaaagtgatttctctaaaatcaggaacaagacaaggctgtccactctctccatctctcttcaatattgtacttgaagttctagctagagcaataagacaacaaaaggagatcaaggggatacaaattggaaaggaagaagtcaaactttcactatttgcagatgatatgatagtttacataagtgacccgtaaaactctaccaaggaactactacagctgataaacactttcagcaaagtggcaggatacaagattaactcaaaaaaatcagtagccttactatatacagaagataaatgtgctgagaaagaaatcagagaaacatcactctttacaattaccacaaacaacataaaatcccttggggtaacactaaccaaaaatgagaaaaacctgtatagtaagaactttgagtctttaaagaaagaaattaaagaatataccagaaaatggaaagatctcccatgctcttggataggtaggattaacatagtaaaaatggcaatcttgccaaaagcaatctacagattcaatgcaactcccatcaaaatgccaacacaattcttcgcagaccttgaaagaacagtactcaacttcatatggaaaaataaaaaacccaggattgccaaaacaaccttttacaataaaggaacatctggagggatcaccatccctgacttcaagctctattatagagccatagtcctgaaaacagcttggtattggcacaaaaatagacaggttgaccaatggaatagaattgaaaaccctgacattaacatacacaccaatgaacaacttatttttgacaacggagataaacttatacaatgaaaaaaatagcatcttcaacaaatggtgttggcataactggattcggacatgtagaagattgcagatagatccacatttattgccatgcacaaaactcaagtccaaatggatcaaagacctcaacataaattcaaccacactgaacctcagagaagagaaggtaggtagtatcctcgaacaaattggtacaggagactgctttctgaacataacaccagtagcacaaacattgagatcgacaattaataaatggcacctcctgaaactgagaagcttctgtaaggcaaaggacacagtcagcaagacaaaatgccagcccacagaatgggaaaagatcttcaccaaccccacatttgacagagggctgatctccaaaatatacaatgaactcaagaagctagccaccaaaacacaaacaatgcaattaaaaagtggaatgcagaactaaatagagaattctcaacagaggaatctaaaatggctgaaagacacttgagaaagtgttcaacatccttagccatcagggaaatgcagctcaaaaccactctgagataccatcttactcctgtcagaatggctaaagtcaataataccaatggcattctatgctggagaggatatggagaaagaggaagactcctctattgctggtgggagtgcaaacttgtacaaccactttggaaatcagcatggcggtttctcaggaaaatggaaatcagtctacctcaagatccagcaattcctctcttgggcatatatccaaagaatgcacattcatacaataaggatatatgttcaacaatgtttatagtggcattatttataataaccagaacctggaagcaacctagatgcccctcaactgaagaatgaatagagaaaatgtggtgcatttacacaatggagcactactcagtgagaaaaaaaaaaaacaaaaaaaacaatggaatcttgaaattcacaggcaaatggatgaaactagaagaaaccatgctgagtgaggtaacccaatcacaaaaagataaacatggtatgtactgactcatttttgatttttagacataaagctaaggattatcagtctacaatccacactgtcagaggagctagaaaaccccaagagaagattgcatagtccctcaaagaagggaagagggacaagaacccctgaacaaagtgagagcatggggaggggtttgagaggaaggaggtgggaggggaagaagaggagggaggaggagaacaagaggactgagacaagggaggaatagaggagggcaagaaaggagatgccttgatagagggagacagtacaggtatagagagaggtctggcacaggggaaatgttaggggatctacagggatgaccccaactaagaatccaagcagtggtggagaggatgccattgatgcccttcccctataaagagattggtgtctaccttggttaccattcctagagccttcatccagtagctgttggaagcagaaacaggcacccacagctaagcactgaaccatactactggaatccagttgtggagagggaggagggatgagcaaagaagccaagacggtgctgcagaaacagttgacctgactagtgagagcatggagaccctagtcatgaagctggggaaacagcattggatcaaaccaagccctctgaatgtggatgccagctaggaggctaaggcagtttatggggcctctaacagtggagccttctttatccctagagaacaatggactttgagagcccactccctttggagggatactattggagcccagatgcagcaaggagggcctacgccctccctcaaacgatatgacagactttgaaggtccctggtggagggcctcagtatccctggggaggagttgggggatgggttgggggttggtggggaacatgggaggatgggagggtgagggaatgggggggatggatatgtaaatatgagcagtaattaaagaatttttttaaaaaataaaattcagtaaaaggaaaggctaaagaaaaaccatatttgttgagggccatttgaggggaccaacaggcagctttgaaactcatgcaacatggctgggcagtcggcaaagccacctctaagtgagccttggaagggcaaatccccaaggactatgcgtcctgaggacatcatgctttattgagcatagctctgatggttgccttttcggtcattacattccactataacccactagatctatgggctgtatgaaaacttttagggctttctagcccctcattggacagtgttactggtacttacaataatagtgattgaccttttccaagcattgatgctggagcaaattaataattcaaccaccacccctagaaagaattgttagtaaggttaggttaagggtttttgttaatgactttgaggtagaaaatcttgggaaacaatttaaagcttagaaagacatacttttagtagttgaacaagggacacactgaggtgagggaacaggaacaatggcagcttgactattgctggctgatgtacctttatgctaggatgggctggtgatcaaaggtaatgattaattcctttgtacccatttctgccctcttcctggtattaaaaaaaaaaaaaaaaaaactgttgaagaatgggaatgcaccctgagaatttaaagtagaactgactgtttttcacatataaaagttcagatttgtgattcttttaagattttataggctaccttttgagataaataatagtgattgatactttctttgtaactgcaaaatgtaggctaccagtaaaagaactggctgagaaaaacaaccttgctttcttagaccctgttaatctataacaagttgcttgtatatgaatgtatgtgggttcttggaaataatttgtttttcacattcaatatgtaaaaggttttatcatgcaagggaaatgagagccatgttgtttttttacctgtgttcattacaatcattcacttgaaaaatagaatgtaaccatattggaatttatatattgcctgaaagtttttgctggggcatataagctgtaggggaaaaattaagaatgtgcagaagtatacatgtggatagaagtaagaaaagaaataaagagatgagagagagagagagagagagagagagagaagagagagagagagagagagagagagagagagagagagagagaaagagagagagaggatagaaagaccctaaaggtgtgtgtgtgtgtgtgtgtgtgtgtgtgtgtgtgtgtgtgtgtgatggggaatgtactgtgtatgttcatcttattgatttttgaataaagtacttgtttgaccaatgagacagcaagttagaaggggctaggagtcaaaggggattctgggaaatgtagtagagaagtggtgatccaggcaggaagtgacatagcaaggagactcatatttaagcaaggagaaacaggaagtgtcccccttttccccttcgtctcctccagtggcaggatgtgagccaccagcaagagagggcgccaacaaaaggcatcctctataagataagtcttataaaatatatagatttatgataattaagattgagctaacagatgagaaccctagtcattggccaagcagcatttgaacctaatacaagtttctgtgtattaatttgggccctaactcgggcaggtggccgtcgtaaagtgcacatgtggtggtggggctcagcggcttggcggaaagatttattgtaaagtgtgtgtgtgtgtgtgtgtgtgtgtgtgtgtgtgtgtgtgtgtgtgtgtgtgtattccttttctgcttgccatagagttaaattttgtcccactcactggccacagagaattaagttttacttcctcagacagaaaagtcaaattgagtgattagtttgccaactctgtgactccctgagctgctgaaggctggtcctcccagcagcacatatcaaaacactggaaatgaaaatttcaataagtcaaataaaaagatgccagggaaagcctctctaatagaactaataacgagaaggacacaatgtcatagcttgtgtcaagtagataaatttgaagattagctcctgacaaagatcaaccaataaaaatgtgatatccatgggacactatgaaaagacaagatctgagcctagaagaaagaagaatttcatgccaaaggcatagaaaagattttcaatataatagttacagaaattgtcccagatctagggggaagatacctgtctacataaaagagacatttagaagaccaaataggtaagataaaaaagaaattccccacatcatattacagttaaaaactaaatatacaggactagaacatattgtttgaaagccacaagaaacaaataccaagtcatgtgtaaaagcaggtaactggaagaatgaaaatgttctaaagagatactgtgtccctcactttggtgatcatactgttgacagaaggtaagccaatgaaatggattttcatcccaggattcacatgctggtagaagggaaaggctgaagtctggtgccagccagaaggggagtgttgtctcccagaaagctgagggattgtcaccttgcaggagagattggagatgagataataatgggaccacaaccaacctcttgactggggctgcttagctgtgcattaaatatggcattctgcctaaacataaacctctcctcagagtctcagagatggactggggaggtaatgagaggagagtgtgtcaccaaatctctgtctctgttctcaaggttgccacattgaataaacctttaattaaaaaaaacaattttgcttttcattataaattcagctcatttttaagtttaacttcatatcttttaattaaaatgtaaatacatcatttccctctatccccttctaagtcccctccatttccttcctagtctcccacatattcttccttgattactattcttatatatgtatgtatatgtgtatatatgtatgcacagatatagacatataaagtgctaagcccgttttttgttgcttgtgtatgtgattttaggactgatcatttagtattgagcaatcatttggagctcattcctgggagagactaacttgccctctctcaccagttacttgtagatcattttccaagtacacgatctcatgagactcgcccacttaagcattagcatgtctattgatatttccacagttaaaaccttgtttatgtaaccatttctaggaaagactgttgtctctgagtcttacaagatttccagcccctgtcctaggttgttccctaagctgtaaatgcaggagctgtggtgtggatgcatctactagggctgggctccctacaatccattgatctctgcattgtatatacttacatttttttttctgtgttggtctccatttgctgtaaacggaagttcctttgatgagagatgacgactgcacttatctgtgggtataaggaaaagatttataatggagttgggaattatactgctctagcaaagtggtggtggtagattctcttctaaggtatgtgacctcattagccctggaaagctcaggttccagtaccatacatggttccacgcctattgagttcaggtctgagactcatataataagctaagtatgttccatgcatatgtatttaacccagcactgaggaaggaagacaggagaatttttcttttgagacagggtttctctgtgacttttggaggctgtcctggaactcgctctgtagaccaggttggcctcgaactcacacagatcccactgcctctgtcttccaagttctgggattaaaggtgtgcgccaccaccacctggctttttcaggaggaggatctttatagcttggtttccagcccagtctaacaaaacaaaacaaacacaagctccaggttcagggagagacccagcctcaaagaaataaggcatagactaatatagaaggacatctgacaccctcctctgacctacacacacacacacacacacacacacacacacacacacacacacacacaaataaaataaataaatgtaaaatcctctaaggttcagctaagggacatttacatcactaagtgtttggtgttgacttaaagacacaagaagacaagtgccataatacttggagaagagctatgaaggccatgactgacacaacatggtgggtgagagaaagccgactcactccaatgaaatctccccagagtgatggaagcaaataaaggaattgaatctatctccctccctgcaaatagataaggagaacaagttagtaaggttgcagaagaataagagtaataaagcagaagttgaagacagtcaaaaaggaaaaaagcaatattgctttctgaatttttcaaaaagactgacgcccagtgtctggttgaaatattagaggcttcactaagcattattttcagctcctctgagacaggagctctgctggcctctcactgcttcagtagagggcagtataacacaacattttctgaggcacaagcatagagggcattcccattgaaagagagaaaaaaaaacacaggggccaggaacagtattttgggttaagtctaatttttaactagatatcagaatagaaaattgagaattgattagatagacataaaggatgctagagaaagtcacatctcaaaaacaaaaacaaacaagcaaaaaaccatgaatccctacactaaggaggtaatggcaggagaataagaagttcaaggtcatccttacatacatagagagttctaggccagtttggaactaccaaataatccaattaaaaatggggtacagatctaaacagagaattctcaacagaacaatctcaaataccagaaagacacttaaggaaatgttcaacacctttagtcatgagggaaatacaaataaaaaccactctgagattccatcttacacctatcagaatggctgagatcaaaaataccaatgacagcttatgctggagaggattggagaaaggggaacactcctccattgctggtgggagtgcaaacttgttcagccactgtggaaatcaatatggtgatttctcagaaaattagggatcaacctacctcaagaccctgcaaccactgttgggcatatactcaaaggaggcacattcacaccacaaggaaatttgctcaactatgttcatagcaacatgtttgtaatagccagaacctggaaacaacctagatgcccctcaactgaagaatggaaaaagaaaatgtggtatatttatgcaatggagtactactcagtggtaagaaacaatgacatctaaaattcacaggcaagtctttggtatgataagactacatggaaatacttagattaatataaatgggttaataattaagagagagttaacaagtaagaagcctaagccatcagccaaacagtttataattaataaaaaaaattcacaggcaaatgggcagaactagaaaaacccattctgagagaggtaacccaaaaccagaaagacaaatatagtatgtactcactcatcagtggataccagacataaagcaaaagatatgcagcctataattcacaatcccagagaagctagaaccctcttcaagaaacagatggaagcagatgcagaaatccacacctaaccaatgggccaagctcctggaatacaatcaaagtgagggaggaacaataatatgaacaaaggagtcaagaccatggtggggaaacccgcagaatcagctgacctgagctagtgagagatcactgactcaggtctgacaaatggggaacctgcataagaccaaactagtcccttaatatagattacagtggtgtgttttggacaatatatgaggccattggcagtggatctaagatctaacactaatgtacaaactgacttagtggagcccattctgtatggagagataccttggtcagcctagacacaagggtgtggggaatggaaaggtgccttggtcctacctcaactagatgatgggacagacttagtagacttcttaggggaggccttaccctctctgaggagcaaatgggaggaggggggagtggggaagcgggaggagaggagggagggggaactgggattggaatgtaaaaaataaattaatttaaaaaagaagggggaaaaattccagtttctggcttgagtgatcaaatctgtaggcagcataagggataaattgggacctgaaaaatgataagtatggttcttgaatatgttaatattaagtagtttaacagatatgtatatatgggactcaaaagagagagagatctgaattacatatcaggtatatggacaaattatggtcaagccatgtcatatgtatgtacattaaggatttcactaagaaaggatatatgaattgagggtggttaaggaagaaatcccccagaaataccaacgttgaagggatagcaatggaaaaaacatgcaaatgaagttgggagagaccgatttgaaagtaggaagaaagttagagcattttaaaggaaattggtagaaaatcagaggatttgaagactgagatgttcatcaggcaggtggcaaggaaggacaacagtaaatagtaaacaaagaccaagagaaattcaaacatactaaactttagttacaaaaggaacagcaggccctatcatagcgcaccagtgaaaacagtagggaagggagagagtccttcaaaatgcgactacaaacagtgcctttgggtgccaccatggacacacaatgtgtcactgtgcaaaaataaaacttaagatggaagatctgtggcccacacagcaagcagacactaaagaaagccccctcccacattctaacttgataactggtgccctgagggacattctcacgggaaagggtttatagttgaacctttgcccagggaaaagagaaggacatgcattttaaatctctaaatcccaagacttccccttctgaactgattgagtgactacctcaaggatcagtatggacctaggaaaattgttgtgattgggactcagatccaatgacaccaaatactagttgtgctgtgttgaggaaaccaaggacaaagacacaatgggatctgaagcccaaactctggtgagaagagagagagcaggcgagtgaggctttgaccctagcatttggaggccagcctggtctacacagaaagttccaccctgtctatgatcctggatagatagatggacagatgatagagaaataggaaatagatagatagatagatagatagatagatagatagatagattgatagatagatagatagatgaaaccaatagtacatgaagagctgagatgttggtgttgccaaattcaacatagatggattatatgtgattagattagggagctgtgtgcattgaaacatatttaaatggtcaacttatagagtcgtgtagtgacactagtgaccctcatccaagctagagtaactccactttgcagcaaggcaccatttagactctctatgggccagacttcaaccaataagtcatccttcttggagttggacaatgttttctgaaaccaacaagatccctgacaagaaaatggtggaggacacctatatgtacagcttacccagagcctggtttcatctgtacaatatgttatctgatcttggagtcacctctgctgctttaaaacttggtatcactgtgagcagaggtttgcatcagttctgcctcaacttagtatcatataaaatgagagtctggcagctagaggagttagtaacttaaggaaaatgcagctgtcaagttgtccactgtcctcctctaactcaccctgttaactccttccactggttgatagcttgtatgagtcattctttgggctactggtgctgtccctttagaagcagatgtgaatttcacgtgccccagggaaattcacacaagtcagaataagaaaataaccaggaaacaaagaaaaagcactatactgaaaattcgagaaatgtgaattaaataataatattgttctcttcaagctggaataaataattgaattgatagatttcagtgatggtgaaagtagtaggatgcccatacacataactggtagaattacaagatgatgctgacattttggggggaaatttcatgttatctgaattttcaactatacattgcctttagtaatgcattctacttgcaatatgccacagaaaaaatacaataatagacatggagacataattcagatggtaatgtgcctgccatgcaaccacgaagacctgagtttgggctctcagagctcacataagtgctggaatggcaatgcaggtataaaaccccagtcttcttgagaacagacaagacaggtgagtccctggagctcattgggatgagctagccagctagtccactagcctgactgaattggtaaactacaaggctcagtgggaggccccaatctcaagaactaaaaggacagtgaccaaagaagacacccaacatcaacatctaacctccacatgcagatgcatatgtgtacagcacaatactgtacatacattgtcagggcctggataatattttggaaatatattccactcccccatgagttctgagagctcagaatttctattgtcttttagatgtcggctgatagctgttgaatggcctagcctcagtaggggaatggctcctattctaagtaaccatagctttgggccagagccaatctacacccaccctgaaggctagtgagccatgctggtgtggaatgcctgagggcttgagtatgtgcttcaaagggatgtctctaggattaagggaaatatttgctatcagccctttatatgtgataatagatgtcttctgccattgtccccacctttggatggttacttaagatgatgcttcaataaactgtggccttcagtattatctgacagacctcctgatatgaccaggtgtctctgtctcatctttaacaacgttggatagttacctttcctgcattcacacaccctcaatcagggtcagacccagggttgttgggctggttccgatcacagccccaaatacaaactgtattattacacagtctgtaataatacatacaacacatatacgtatacacacagaaaaatatgcacaattgcacaagtacaatctcacatatagtgtgtgtgtgtgtgtgtgtgtgtgtgtgtgtgtgtgtgtgtgctgagacagggtatgtctggcaatccaggaactcattatgttgactaggctggccttgaactcacagagatccacctgcctcatttggtatagtgtataagaaagttgaaaatggcctacacatactaatcaaaaagaggttggataaattattgcataaagaaggactttcagagtccttccaggggaatatgtccaatagattattgggggaatgtttatagacaaatccatggtaacctattctcactaaaatccatgtgtgtagggaaggttatatttaatgtggttatatatgcattgaaacagcagtaatggatttgcataaaactaggcactagttcctagctccatgttgtgttataaagcctgaatcaagtttttggcctttatttctacttgattttattcacaataagcatgtttaaaacaaacaaacaaaaaaccaaaggatttattttatgtatgtgggcattttccatgtatatatgtatgcatgcatacaatatgtacacctggtgccaatggaagtcagaaaagggcacactatcccctgtaactggtgttacagatgattctgagccactgtgtgggtgctgggaactgaaccctggtcctctgcaagaatagcaaatgctcttaaccactgagtcatctctccagcacctaagtatgtgttcttaatctcatctgttactacacgttcaaagggaattaagtgtccattggatttgataaatcatcaatttcaaataaatcaagagaggaaacattattatgcactaaattaaggaataaataggtagagtataagtctgaatttgtgtctgttttttgtttacttgcttgcttgtctgtttgctttgatagtccacagtatgaagaagagaaagaacaacttttggactcattccctcattctgcatttctatctcgccatgcccctggcctccatgtaaggttcatggacaacccaagggtgtaaactcaagatatatcatagtttatctgctaaagcttccctcctacaatgccagaaaccaagtctcaagagcgtctatgaagaaaagagagaaaatatttccccaacaaaaagagaagaaaggggaaaatgacaagaaaaaaaatattttaaaagagatgccaaacagagtgactagaaacagaagactgaaggaactagagatgtcacatgacatgtgtgctctttgggttcctggctacttctataattgcactagatggaattttggcttttcaccaacatgttagtcatcccttgcttctactacctcttacatgccactaacacaccctgggccccagttgtagtaacccaaactctctccagaaaccatcagcctcttgtgaggcaaaatcactctcagtgattatgcagtagagaaccactgcataaacttcctcattagaacaaagaaattgctggaatttcaggtgtgacggctgaggccttagtgttggaaatggtgaggctgaggataagaagttcaaggccagcctggccttgaaaccacttttttaatcactggggggttttgtggggcttttttgctgttgttgtggggttttttttgagaactatttttgctgtcccatagagaaaaatgtttttctgtcgttcagtctatctatcaatgatctgctcctatcttgtctaagacaccatgactgtttaaacaatgtgtacttaataaaattggatatctttttaaatactggtgaaagctgccagcgacagcagagttgagagcatagcactgaaataagggtaagggtggggatagttggtagagtgcatttctaaactcagtcttctcattttcgaggctgacattgtaccggctgagtcatctcctcagccctattctgactttttgatggcaacaaataaaagtccaaggtaatcccttactgatggtattcccctggttctctggatgagtctggaggctacctttacattctcttcacttcacctgatctgtactgctgtgtgtctaacaagctgtgctggttggatttatgtctacttgacacaaactagagtcatctgaaaggcggaaacctcaactgagagaatatctccataagattgggctgtggggcattttataaattggtgattgatgggcaagggccagctcactgggtgtggaccatgccaggcctgctggtcctgagtaagatatgaagagcaagccagtaagcagcactcatctatggcctctgcttcagctcctgtctccagattgctaccctgtttgagatcctgtcctaacttgcttcactaatagactaatgatgcagaaatataagacaaataaaccctttcctccccaggttgctttggtcatggtttttcatcatagcaatagaaaccctaacaactaaaacataagcaatatgacccaagattggcttccttcaaggtcaccagaacttggccagagttttaccctttcctttttttttgtcgcttagacagtagcatggtgatgatataaaaagacatgttgagcaaccaaatcaaactgaagacccagcagactatagaataggaaaagatttttaccgactccacatctggtagagaactaataccctaaataatccaattttaaaatgaggtcagatctaaatagagatttctccatagaggaaattcaaatggctgaaaagcaatgttcaacatcctttgccatcagggaaatgcaaatcaaatgcaatctactttgagatttcttgctggggacgatgtggaataagaggaagactcattcattgttgtgaaatattactttaactatgtgaagatgcgctccaattgtttatgtggcgggatattactctaactaggcaaagatgtgtcacatttgtttatgctgcatttgtttaatgatacaaagattgctacctttctttatgcagcatttgcttaaagatgtaaagatgtgttaatttgcttgcctaaaatacctgattggtctaataaaaaatgaatggccaatagctaggcagtagaggaataggcagagatggcaggcagagcgaataaataggaggaggaatccaggctcaagagaggggagagaggagaaaagagaacaagggagatgccggcgagaaagaaggtggcaaaaggagagagagctagaagagagagagagagagagagagagagagagagagagagagagagagaaaacatgtggaggtgcacgcttaaaaggggaagcctgcacatgcttaccgagtcctcacacagccacataacacgtgccctagctgtggccacacaacacagggctctttgggcagcctaatgccaatactcgtgccccacccattgtcagggggcggggtcagcataatgccttattcagccaccattagggaggcttccacctgcagcagatgagaacaaacacagagacccacaatcatatattatgccaagagagagaccttggaatacacagctctaattgggatgtctccatcaaattcctctcctcagagctcggggaacccacagaagagaaggcaggagtgtgggagccagaagggctggtggacaccaggaaaataagtctctctaaatgaacgaagcaaagctcatgtgaagtcacagagactgaagcagcaagcacaaggcctccacaggtctgcactaggtcctctgcgcgtatattctagcattaagtttactatttctatcggactcctgagcgtatgaacaaatgggtctctgatttgtgtgccttgttttgtggttctcttccttctgttggtttgccttgtgcaacttcgatgtagttagtgggttttgctttgtcttatattttattttgttatgttttattggaatctcttaggagtttgttgttttctaaagagagacagaaaaaggagtggatatagatggaagaggagatggggaattgggaggagtagagggaagggaaactgtaatcataatattttatttgagaaaataatttattcattcacttatttatttatttatttatttatttatttatttattttggcttttcgagacagggtttctctgtgtaacagtcctggctgtcctggaactcactttgtagaacacactgacctcgaactcactgagatccacctgcctctgcctcctgagtgctggggttagaggcgtgcaccaccactgcctggcaagaatttatttttaatgcgggtggaggggtgaacggctgaacacttcaaagctgccggtgtaggaaacaagacagaagtagagacccaagaggagaaggcaaaacactcctaaaggctgttaggtcctgcagaccttccttaccagaagcacagcgaaagctgtcagtcttcagtgccaacggtcctggactccagattgagaactctcaacactggctgctgtcaagagacaaagatttgataccagaggactgactgccctgaactggaacactagagggcgctgcttgatgttgtttctgctgagacaggcagaaacgggcagctgctgtcaaacaccgggaagcaaaagctgaagaccaagtcttcacacatcttcttcctgtgaatccatgatcccatccaggaagagcaaaggaactccagcctgcttattgctacacattgttaccattcagttactacactattccctcggtcattctccaccgctaccattgtatgaatagtctagcttacaagttagattgttctgctgtattcttcagaggtaaacatgtatgtatatggtgctagccttaacacaatgccttatgtcttagcagcaacctcaagctactttatatgactttctaaacacaagctggcatatcacagacattagcatatcagttcacaaacaaacaaaataaaaatgtgtgtatggagttagatggcacagctctaaggagtatgtggcaccctagggacatagaacaccgattgagaacatttcctgcatgggaggcacagagcctgggttggaggcaccgtgcctgcttcacctccagtctgcaatggcaagtttggggatgaaggttgtagggcaaacccagcactttacagatggttagaaagactgaggttctgggtgtgtctggtgagagaacatgcttggaaaaaggaaaaatggggagttgcatccgaaagcttgcaaaagaaaagaaagaagaaaacgtccaaatacatgatgaattggagtggtggactagtctaaaatcaggttaactgctacacgtggtatgccctttcctaagagccacttacacctagcaatgtgcaagcagccatacggtccccgaatctgtggaggaatccctgtagggcaaagcgatgactcagaggggatgccgttgattagatttgcatgtgttgtaggacaggatttatatgtgtgttctataactgttgatttcacaccctgagacttccctctaactgtaactctgcatatctttgtctacattagccataaagtgactttctattgacgtgagaccagagctctttgtgtcctatcagaatcctgtatgtgtggaaggtggcggggggaggggagggtttctaatacgcctggcattctcagcatcaatttgatgttatccccagtttgatgtgataacatgccttttgtagcaataccaccctaagtttccacagcacattgccccaaatgctctataaatctgtttgtatcagcttgcacagctactagacaatgggaaaacactgttaagattctaagctaagcttcacactcccccggtctctctcacataaacttgtgagaacaggagtaactatgacagagatctctgcctctgtctacactacctgcaagtttcccttgaaccaccccatcctaacctggcctgggtgtgtacatgggattcacacacacacacacacacacacacacacacacacacacacacacacacaccatagaaagagagacagagagaggagggggagagagagggagggaggaagagggtggagaggggagagaaagagagagagagagagagagaagagagagagagactgcacaagttaatggggctggcattagagggtcaggtgatttttttttccatgggaagaatttagaacagcattgaggacaacaggataagtggagaaatgactcgggcatgtggttcacaagcattctttattgatgatttagctttgcttgatccatttgatacacggcacctaaactgagatctgatctgaagttagccaaatctgttaaaaacgaatgaaacaacagctaatttcgttactatatgaacagtccagctgttaagagaaccttctatgtgtgaagagggcctgagtttaattccaagcatccacatggtagctcacaaccatccacaatcctggtttcaggctccaacgctttcttgaccactgtgggtactgcatgcatgtgcgtacatacatcaatgcaaacaaaacactcctacacataatataaaataaatctaaaactatttaagtaatagttaatgttactgaaactttaccaggaggtagtccgttttgctgattttaatatgcataatttcatttattatttccaaccttaataggaactacagccatacttatttctaagatgagaaactgaggcatggaagattaaaatcaacttacccaatgccaaataaaaaataagagactgtgaaggttaatactttaccctgatgggatctataatcacttagactacgtgcacacctataaagaaatatctaggttacattaactgacataagaaagcccatcttacctggggtcaggacatttcctggattgggaccctggacccttgcgtatttactttctagtcactgcagtactgctcttcagagctgccctgttaccactcccatcctacacgcttggtggaggtgagagaaggcagttgtattgtaactctgcagatgtagagacaaggaatcagagaagcaaggcggcaggcaaccttatatacatacatacagcacagcacttacatatttatatactttataacttttctgtgtccaggatgcgtttgctttttgcttcataattatgtggcacatttctctctctctctctctctctctctctctctctctctctctctctctctctctctctctctctttccctgcctcctctttttcacttgtcaacacaggacaaaacagtaagctgttcgctcccccagatgcaggcacttcaacttaggactctccagctttcagaatagtagtaaataagtcttaattctttataaattacaccttctccggtaccctatatgtgttctgataaccaagtgatgctaaaaggctcttttacaaacctggttactgccatggtttcaaacaagcaacatggttccttgttatgaagtgttgtaagccccccccaagcatacaagcattctctcctttcttcaaatcattttttccagaatcttgaaatttctgaatttccccacacattctctcctttccagtctcacaaaagacggactccaggagacctggaaagcctgccctcccatgcttctaaatgccttctacaagcaaaaggcagtgctggaacgttcatgccttcccagctttcatcgttcggaattcaaccaaccagcatatgtccacctgtaccagcagctgtaggaatgtggaagcaggcaaagcaagcaatgtctgtcctttgatgtttttatgttttagtaggtggatcctgtggtgaaaacaatcaggcaaggggcaggggataaagacttcttagaaattagggaatggtgctctctagagggataaaaggaaggcctagtagatcttgaaaaagagatagccacatgggtatctgaggaggggaggggacccctttcttgtaatgcagaagatggaggtgagggtgtactctagaattcttaaacactaatgatgtgtgtgagacaggtgtcagggagagggcagtataatgggtagggcctcaggaactctagaaaggaccttgcattttaatccaaaatatatgggagacaggcaagaagaagaagaacaacatgggctaagatgttaaatgtaccactttagtagcctattgatgggttcagagggctaagacagagacaaagagactagttaggaagtgttgagtgtactaaaggtgatgagatgtgcttgaattctagggatttttaaggcagaatttgtcaggtaactttgtgttactataatgaaatgcctgaagaaattaacagtgtcacaaatcatttatttagttcatgcttttggagactcaaatccaaaggtgatcccactgttttggcctctcagaagtgcaccggatggcaatggtacaaagtgcacggtgaagtgaactactcacgataatgagccatgaagaagagtgagatgagactactgtgctctcccatcctctttgaagtatttggataccccaaaacttaaggacctcccttaaggcattacctaagcattcaaagcacctcctaatagtatcaccctaaggacaaacctttaacacataaacctttggggaacactactcatattcaaaccaaagcatagagcccatggaatttgatgatggttggatatggggcatgacagagtggagttaagggaaattacaagtatcaggcctgaaaagctgagtgactatggcagcaatttactgagatggagaagatacttcgagtgaaataagaagcccagagtgagaaaacaagagttgatctggcacataggaagtttcagatttaggctaaacctccccaggcagatgctgagaggtggttgtgtgtacaagatttgaattcaggaaagatagatgtaaaattgaaggtgttggatcagaagaccaggtaagacagccttagacattgagataaatgaatcattaagcttaagatttaacccagaaatatttcactctttatagataagagagattcgcagcaaagaataaaagaaaacaagacagaatgggacctcatggacaagaaggggtgctggccagtgcagtgggtttgaatttagctttcaaaggcagattactctttatcttagcttagtctttctttttcaatttctctctaagtagtccttgaaggggcacctcaggacttttcaatgaactcatttgactccatctgggtctctttccctttcataattctctctgtgttgcacaaaaaaatcttgatctggtcagttacagtaacaaggaaagctatgacctgaattacccaagctccttctgggtcaacttgtatgaataatttctctcacatcttcattctgcttgctgagcattccaggaatcacaatagcaaagttttataataactattatgtcttccactgcccacatctatacagtgtgttgtgaaaacagcgatagtcaataatgcctattataggataagatacgataagatttaatgtcactgcatatggattcttgtcctggctttgctaataatgaaatgtttactaataagacatgtctagaaaagtatgtctctggctcttaactgagctgtcaagattaataggtaagtgtcagcctgtgagccaagttgaaagatgatagatgacatacaacctgacttgaagactctccagggacaaaactgagtaaaattggttaaagccatcagatgaggcaggtaagaataaaaaaatctccaatttgatagcaaagtaaaacagaaaatgataaaagtagaacagaggaaagtttaatctgttccaaatgaattggtggatttctggagctccagccttcaagtgacagagactgagccaagccacacctaagagagagcctctgaaaacctgttctatattctcagtaatgggcacttttgttgtttttcattccatctttttcttaaaaaattattcgttggcagtttcatcacaaattttagtgaattttagtcattttcacacctatcaccctcatcttattgaaactgttcttcctgagaagtcacgctcttactttcatgtctcttggtgtgtgattggctgaatttaattagggttacctgcatgagcactggtgagctgttattagagcaccgcctattgttcagaggttataccactgaagaaaatgatacctcttcccccagcaaccattgaccaccaatagtcccttggggagggtggggctccatgagcatcacctctatccaagatgaggtgttggaggcccaaacttggcagagcctgtgcaagtagccacagctgcagtgaagtcacgggcacaagggcagtatggtgaccagaagatgtcatttcacagcacacctccttcttttccgggtcttacattctttccaccccttcttccacaatgtttcctgaaccccagggggtgggagggtagtgttatagatgtcttatttaaagctgggcactccaccatcatttgttcttggaccagttatgagagcccacagttataaaaagcatctctgaccaaggctgaaggtagcactaatccgtgggtataaacctgagtgtttaaaaggcagtttaatggtctgcccatttagcataacaatagtatcaggttccctttgaaggcctatgacttgcccagcccacaggttcttgactaaatttacagtatcaagcagggtttccttcccacgaaacaggccccacatccaatcagaaagtacctggctattcccatcataatcgtgccactgttgggccaatgggtacttcttttcgggtaggtcactattaaagtttgcaagtttcaaagttaggtaggtaagactgatagaggcttttctccacctgtagcctgcaatagcacattccagaactgtgaaaactagccagcagagaggaggcttccagttcagtccagcttggtatctctgtgctctgtattcaaagtatgtggttgatgtctttagtaatagggacttaccatcaaattctggtgggcaaccaagagcaatggtgaaagcctggactccctgactgcacctgagcccccgaccaaccgttggtaaggagttgtcttacacctgacattgagattttcatttactagccaatggctttttatgggattactgtccactcatacaaggtacctgggttcaaattccaatgattaaattttaaataagtgtatgaaatggtaagtttccaatcttttggtttttccccatccaccattctcttccacccaccgccacgtagaccattccaaccccagtctctcagcagccactttcatgtcacacttgtaatagagatagtaaaaataaaaacaaaagggagagaaaaggtgcactgtacagtgacacagacaggagagatgccaggaaaactcttgatgagagcaatggtgaaacaccatttccaaaagtcagcggcttgggagtcccagactggctgtgaagttcattttcaggaaacagaagtaagaattccctaactgtatgcaaaatcgtgtgggtagaacaccatggattggggggaaggaaccttaaaacagagccctccttaccactgaagtggaaatggggaacaaagatccaagtgacccagtaaccatcagaaaggaccatccagggcacttcctggatgaggccagcattgatgcccagtctcacaaagaaccattcagaggtgtaacaggcatttgggaccccaggaaggaacaccaagaaagctgagaatggaagggtaggacctcattcacatgcacacatatacccaagccatgcttcccttcacatgaatttctccttcactgaatacctggtatctatgctggaggccaggcactttctctgttctttaatttttcattttcattttcatgggctttcccaaagaacacaggctggcctcagggtctctttggcccagactcctaagacctggactcttcttggttatcagattgaatttctttacctttctcttttcattctacctttagccaaaactgcctcattccccaccctgccccctgtccccatgttgtttcctcattctatttagtttttccctcttctcatttttttctcaatatgaatcacaagtcattctgctttttcccttctactcatatgcataagacataatatcttcatgattctgttctattaatattcatttacttcttacaatgagtgggtattaatgggtgatcatttgttacttggctattaccacatgctcttggtgggttttcactttgatagcaatcatttttgttcagatagtgtctactttcaggggagtactagggcctagcctgatgccccaaacaccaaccaagcagagaaaaaattccatccaaccttattacaacccagtcacctttttttatttgaattacaaacaagattgagttacatgacaatcccagttcccttctccctcccttcctcccctatcacccccccaactaaaaccctacctatcacatatcctttcttctaatctacacctgactcaacctttctgctccctcatgacctctgcatccttcctgttcttcccttcttattctcctagctccctcccccctcttcccatgctctcaatttgctcgggggatcgtgaccctttccccttctccaggggacaaagtttgtctcttttagggtcctccttgtttactagtttctctggtagtgtggactgtcggctggtaatcccttactctatgtctaaaatccacatatgagtgagtacatactatttttgtctttttgtgattgacaacccagtcactcttaacattttgaatattcctgttaaaagaaaagtcctattttaaaaaaatttcccctcaaccgaagaatggatagagaaaatgtggtacatttacacaatggagtactactcagcagaaaaaaaacaatggaatcttgaaatttgcaggaaaattgatcgaactcgaagaaaccattctgagcgaggtaacccaatcacaaaaagacaaacatgatatgtactcactcatatgtggacctgctttatgatacatagtagtgaccatgctttatcagagctgatgcataacatactgctattattggtctttttatataaatataaatatatatacatatataatttgaatttttggaaactttagctgtgctgtcaactttggaaaaaagtatcccagtttaccgtgttgacttggcattgtacagaaattaacagccatattggtctagaaatgttgaacttaattttttccatttgtacagggtaacacactgtattaaatatgtaaggtcttatctacatgggtttgattacaaaaactaaggtattctctaaataaaaaaaaaaaatttcaagcagtacccaacttgaatgatccagccccaatacaaaacgcaaaagtatgaaaaccaaagacactataactcagtgctctgaggaaggcagaggaggtgagggagctatggaggctgctgagggatgaggacgaggtagggtgtccataaaagcaggagtctgaaacctggtggtgtgcgtcacagtgccacgggcaggccccgcagaagcttcgaggcaaaggatggaagtgagcaaagttcacattccaggacacctggatttgtactcacatcgttcgcttcaggcttccccttgctcttcccttcacggctctactcttgggtttcctctcgccatctgcagagctggactttctacccatccagaattatatccagcatcactctacctacccatccctaaaggacacttactgtgcagtctccacccacccctctgtcactcctgtcttcctgtcatctccccatttggatactaaaagggtggcacttgtaaactagagaattcaatctgatctttttaagtctgtttttaataatctttccttttaattaattttatctatttatgcttaatataagtattaatgtagtggagttagatctgctattcactgcttgattagtctttttaccatttttttccttttatttaaaataatatttgattttttataatttatttttagtaagccactgttgatcttttaagcacttacattggcattatctcctttgtattttctcttcatcgaccctttggacacacttttaatgacgtatttgagtttcttgactactgagttatcattctatacttttttggagacagtgtcttaactatgtagccctggttggcctgaaagtcattgtgtaaacaagtcaggctggcctcagactcacagagatccccctgtctcttcctcccaagtcctgagattaatatcatgcaccaccactcctggtttatctttctaatttttattgatattgatgacttctttatatatattttatatccctcatggatttaaacatcacaaatatcttcccccgctcttatgacttctccttttattctcatagtagtttcgatttatttttattgttatttatgcatatgtgtatgtctctgtacgtgagtctgccatgtgtgcaagtgctctctgaggccacaggaagtgtcagatccctgaatgtacctctttcagtgctgggattagaactctgatcctctggaagagtaacaagagctgtgaatcagtaagccatctctccagttctaaaagaagtctttgatattgttgtcataagtcataagctacaacttctcaactataaaaacaggctgcatggtagaatttcattcacagggtttattggaagaataaataagacgacatgtactctcagcacagtgactggcatttagaaacacttactaaatactattctttttttctgccttccctacccccatctaacctatttcctgtttctgaacctgttagaaaaaacgggtaacatacgcaattcggtggagcaggtgaagggacccgattttcacaacacagggcaacagcaggataaccaagaggagttccagtgagggtccagcatcgataggataacagaaactgaaggtctctaaccagaccaatgactctttgcaaggaacacttgcaagtaaagagatgtgggaaagggggtgctgtgtgactcactgtgtcacacggcagcttccatgacgagattgattttcccttctctttcctttttttctctcttttttctcttaaattttattttatttttattggggggttgcaagagcagaagatggatataaagggacggggcaatggatgggatgaagatgcttgatgtgaaagacacaaagaataaatagaaagaaagaaaacaacttcgcaaaaagtagtaacaggtaaaataaaaaaggcaaaccatttctatttaaaaattcctacaaagtgtgtgattccttacctgtaatagaaaataagagccttgtcaatcatttttcccttccttttggaaatcctagtgctgcgacagaagatgagacgaggcattctaacgtgactcctcctacctgatttaaatcccagctgagggatagaagagccagatgtgtcagcttgcgttttcttcctctgactgactgacaagctggaaacgatatggctggtttctccacattcatcatctttacctctgtcctctgtcagctcccaggtgagtctaaccctatcttggcccattctcctcacctcctcatctggaggtgtaatcccaggctccctggtccactctggagcctccacatcttttagcactgctttctaataaaccactgatcactggaaagagaagaaaagagacagctgttggaactaagtcccttctgactgggaagaagagactgaagtaactggggctgggttttagagacctgtgttctgattcagatctgtcatgacttaaatggacaatgccattgctatcctgggcttcagggtctcgctcttttagccttccctccttttgagaacaacattagaagtaaagttatacagctatgtatttattcataaacattttaattaatatgtttctaaatgatggtgtataagagtgagatcaatggaagcaatcatttgaatttattttctcttaacccaagcaatccaatctgcccctacttagaaaattaattaattataggtactctatgttcactcgtgtgaaggactggaggtcttatgaccctgtcattagcatgatggtaatgaaagattttactatactcaatgttctctgacacgtggggtaccaccatgagggtgctctctctctctctctctctctctccctctctctttctctccctccctccctctccctctctgtctgtctctgtctgtctctctctctccctctttctctctctctgaggggctttcataactgtcatatctgttcacaataaacctacctgaaataacttgctcccaaaccacacaaccttttcagtcttttccttctcataccaaaccatgctaagtgactctacagactgtcgctcctccttgaattcatcaaagcttgctaggaagcacctggccctaagtagattgccctaaaacactcttgattctaaaattactacctgaacggaaatggtgatcagaattagaatttgaaaaggagatgggggagggcatggcagagcttcaaaaagcccaggtgctcacctgggagaaatgcatagtgcgtagcatgttgggtatgtaacctgagtccctgatactctactccagtaggctgtggacagtctggtattacatctcccatggctgaaaagagtcggagattgtcctagaatgtccaaaaggcagagcagtggaagcaggacagaccctggaaacaagttttctagtttaactttgtactggattgctgtgagcgaacatcttggtcctttgaactttccctctctgtgcataatgaattaacttgcagagttactgtgatgttttaaagtgagatagcaaaagcaaactaattaaataataattgccatttaagttcctaattttactatactcagtgttctctgacaaaaggggtaccatcatgagggttctcctctctctctgtctctgtctctgtctctgcctctctctctctctctctctctctctctctctctctctgaggaagagtttccacagctggcgctatctccagcacactaaacaataacaataacaacactggaaaggtgttcagtaaaaatgcatttgaactgagtctcccatagcgagagccagatgggatttcttccttctctaggtacaggagcccaagatagggattgtaacaaccctcagcaaacacatagcactgttttgggggcttggctataccaatgggatgccgctctggacaatttgacaggagccatgaggctaactctcgaagccttgatgttctcatcaggataaggaggacagcagtctgttcctctgagtgttttgcaatgaccaagtcatgcagtggttttaaggaaaacaaagatgagtgaggggtgtggaggaccgctgcaaagaagcagaagaaacaccgagaagggggtgggaaacaaacaagaggcagagtggtgatggacttcgatgcaaacgcagcaggctggatgtgccagacaaagagcgtgacagtgggaaagagtgagttctgttgtgcgtgtaccccgtggtattgacttacaatgcaattttcagggacattacaaaagaagctagcgaaagggccacccatttcaaaccactcatttttttgtttggttgtttaggtttttgttgttgttgttttggattttttgggtgccccccccccccggccccgctatgggagcagtgttcttcacttactaacagaacaaacacataaatgattctacctgtagttgaagcctcaatggcaatgaagaagctccaagtcttggccctctgttctttgtgcctccccctgagctccccagaaagatggagatttttgagactccaactgtaacgagaggtacaggggaaatcttgcctttagcaccttggttccaggcctccctctagaaaccggtcttctcatctgagaaacggaatggaatcagaccctcctgaagcgtcctcccagttctgagatgctctgttcttgacttccatgaagaagatggtccgatgtggtgatgcatttgtagcattcgctgacaggcagtggagctttgccaggcctctcccctgtgttttctgaaaagtttctacatcctgataagcctctctgcccatgcagcaatccaaatcagaccaaatcaaaccgaattagaaaaatctcacatttaatggatacaacactctcagattgcctttcagtcctccagagaggaaacgggggaagaaaaagagaccagaaaaccatgagtctattttcagggggcagtttaaataccctgtggaagtggttttgagcatctctgggtgaggagtcatcatttggcgggttttctgagatgcagcagggtttggagagagatgggggagggggattgggtggaatttcctccataatatcccagactctttgggtatggatgccatgtcctggggtgacgcttgcctggcttgccttcctggggtggtaactgtatcttgtggtttcatattcctacttttctactggcctttttggagaatgtaacaagagggagaagtgaaaagaagaaagggcactgacatgagggaggagatgttgtctcattctgctctgaaatgtatctcagagatgatggtactcccgacaccaaagacagaaaggcagaaggcgggcagtctcctggtctagcgccgcccaccgctccagggtgggagcaggctgcctgggagatgtacaatgtgttgcctgaactccagagttactgctgagttttgtgaactattttctcccatatttcactagtgaaacttgaaaaatgggaagccttggctgccaggctgtctgcatctgtcaaatcagcttctttcagatctgcattcactcttcaacttccccacattcctaggacctgaaggtgtttttctttaagtaaggtatcagagaactgaaactcaaaatggtaaattaaaaataaaagaaaaatcaaaacacaggcctctgagatgaaggatctctgcccctcccccctctctcaaactggggttcacactcgggcctcatgtgcatccacaaagatagctaccactgagccacaccactgacatttttgtggtcttagaagagtcaatgagccctagtaccctcatttataaactgcaatgtgttagctcttgtcccctggacttgttcagaagaccaacaaagataagcccatcagactggcttacagataccaagtgtttgtctctagaattacgactgtggaggagccagagtggatcctgggtcccctgactcccactgaagacagattcctttttcatcctgcagcattctggtaggaagagaggtcatcatatccttctgtggcacagggtaatctccgacataatgcttgtagactagacgttggctaattcacacaaaaaaagagacatgtccagtcaccaccaggtagggatatttctttcttgaaaagttaaagttaaaataaaggaacacatatgaggagatattccagaggtatggctttgaacaaggttttgaataagattcttttcagatagacagagaagctgaagcacaaaaatagcataaaatcaaaactgaaccaaggggccaacaatatggcctggcaggtaaaggcacttgtcatgcaagtctgtcgatctgagttcaaaccccagaaaggagaggtcagacttcatagttgttctctggcttctacatggcacaccatggcatgccccccccccacacacacacatacatatataaagtatgtgaatgtgcgtgtacacacacacacacacacacacacacacacacacacactgaggatcaggaaagagaagagacctggatacttatccattgacaacaggtgaattttgtgttttccacagccttagatcattatcttcgccttagagctaaagcccaggcttctctcaggtcgtgtgacaacttctaggacatgtaacaactctaaggaaatcactgtgccagaggagaatatcacttaagctgagttctagcagacttacccaatccacttggctgctacggaatgtgaggtgaaatggtcgcagaagaaataagctatgctgttccctgctggaactgtggcatcagaggcaggtggctgagtcccacgggacccagaccttcaggaaggaattggcagtcatgcattctctagcaaacacgcgaagcctatagcccgagggctacatattagctcaagaaaaccaggaatgtggaccagtacaaaattggaaacatacttaaaacattatgtgattgttctagtaactctactatgcggttctcacgggcagattattcagatggctgtcatggtgctatgtcaaaaggctgggcagacttgtgagtccagactctagattcttctgtttccacgggtcaggttaagccctcccatggacccctcactgcactcactagttcccttctggtagcacgtagctgcttaattgttgatttctcgcaactttgtaagtgcaagaattatgaccatcttgcccaagtcctcaattctgtctttagctcctaaaaaaggcccagcatagcaaacatgatctgcttagataagagcaaactgcagagtcacacctggaggtggtaaaaacagcacaataaaaagtttcgctttgaacaatttgttaatgtctctagtttctagatgccacctctagtcactgggataacagaactaaaccggctagaatttaccaacactgctctttgttccttagcccattgtttaagaaatggagggagctggggttttttgtttgtttgtttgtttgtttgtttgtttgtttttccagctaacctccttttccatcctgaagatactctttaaattggaacagtagtctggggagggtggcacttcaggggtggaggcaggaagataagaattcaagactgtggggctggagagacggctcaggagttgagagcaatttgttgcacttgcagagaacttgagtttgattctcagcacccacatggtggctcacaaccacctgttaactgcagttccagggtatctaatgccctcttctgactttggcatgcagatggtatacatacacacacacagacagaacacttagacacataaaatcaaatttaaaaatctaaaaagcaaatacttttaattggaacctgttgaggatggagccaggctttcaagtttaccatagagcttggtctactcagctgggagtctctgagaatgtggtgtggtggtggtagatgactttgcagacagaaggttctaatctcaatgcttttgtgtaggcggagttctgcttgtattaaacttagagatattcctcaaggtcttccaaggacccaaagaatgtggtaatttgtggcaagagcttacattacggttttctgtgtctgcagtgacagcaacttctggacctctgaaggaagtggttggtgcccttggtggatctgtgaccttcactgtgagtttcccagaaaaacagattgacactgttatatggaccttcaatacattcactgttgccatcgtaaataaggacaatgccaaagtgctccaaaatcctaagaaagaaaaaatactcttcccagatggaagctactccatgaaactcagccagctgaagaagaatgactcgggtgtctaccgtgcagagattcacagtacatcacttcagtctcccttcacccaggagtatgtgctgtatgtctatggtgagcaggctcagttctaatagtggatggcaggcatatggacgcagtggatagcggatggcaggcatacgggcgcagtggatagcggatggcaggcatatggacgcagtggatagcagatggcaggcatatgggcgcagtggatagcggatggcaggcatacggacgcagtggatagcggatggcaggcatacgggcgcagtggatagtggatggcaggcatacggacgcagtggatagcggatggcaggcatacggacgcagtggatagcggatggcaggcatacggacgcagtggacatcccaatgcagtgaatgtccaagttaagttttggtaatcacacaacaaggatcagggagcagactgacccacaaggtctctgcttactttgagattctgtaagaggctgtgcgctgtagatgatgggcaacgtaagaagtggctatcagctggacagtggtggagcatgtctttagtaccaggatttgggaggcagaggcaggcagatctctaagttccagaacagccagttctgcagaatgagttctaggacagccagagctacacagaaaagccctgtctcaaaatcaaaacaaaaatgaccaaaaaagtggttatcacacagactgaagctaatgtacatggccttagccatgttactttaagtcttagtttccgtgtatgtaagtaggacaacggtgcccaccttaagaagatcattagatacaaattaattacattccttcccctacaaactctaagcaactgagaaatagagccaaaaatcagaactaagataacaaccagctatgttatgcatgtagttgtagctactctggaggttgggacaggagaattgcttgggctagaaaggcaacagaaaggtagagagggagggaggaaagagaaaccactcaatgaagttaaacttgcaaaacaatcactcagctctctaccagaagagttacttgtcttgtgcactgcactacagtatcagagaaaccaggagatgggacataagacttacttgcatgaggggggcaatgcaccttgatccaggcttatgttccatagagacactgtagaagggaacaaaaatcagacaatctagctggggaaaggatgaaaaggaaaagggtatctgaacagaaacatttaatggaccaagctctaggatagataacaaatgccagactctcacaatctcaccaacaaaccatttgctgatcctctaaacataaaggactgggcacaaggtagcaagcagtattactgcagtattattttctcctggagaggagaaaggaaagtgtgttcaaggaagtctgaggacaagcaatagtaagcctctgtctaaagatcagataacatctaaaatacaagtaagcacagtgcttgcccagcagctaggcttagtgaatgtctctacgttgttgttgcatgattatttctgctgtaatcgctgctgttcgtattcttgctctataaccccccgggccaagcagacttaagaggtctctttctcagataagaattagacattccactccgaactgttgcttccttacccttcttggacttcctagggaagctgagctcggggactaacttccctcctctgttgtgctatgtcttttacagagactctgtcagcaccaaaagtcaccacggatgagcaacccagcaagaatggcagctgcacaacaaaactgacatgctccgtggaagaggaaggagacaatgtgacttacagctggaaagccatcgggcagggagcccatgagcttcatgatggtgccatcctccccatctcttggaaattgggagagaaagaaaagaccttaatttgcatggccaggaatcccatcagccacagttcctcgaaccccgtccttgcccggaatctttgtgaaggtgccagtcttctcttcccgggagcctctggttggagaaatatatcttctttagctgccaagtccctatgaatacaggctctgatcaactagagagaggcctcagggagagcagcaggctgggaggaaattggaatttaggtccttttccctagctgactccaccacatatccgtgctcctcatgcctctcctcgttttctcttaaagatactgccaacctggacaaaagttcacccaggttcatcctatacactctaccagtggccatcgtgttcagtctcacgctgattattgcctttgctgttcggacagagaaaggaaaaggtaaagcatgtgtggtttgtttttgtttttgtttttttacttcatttttttctcccttttattcctcatgtaatacatcaatgtgtgtgtgtgtgtgtgcaaatttagagttaaagatgtaagaggccatggtctcttcccttaagaagcttatgatcaacggctagagagaggtcattcagtaaagtgattgccataagagtgtgaggacctgagtttaaaccccagagctcacatttgaaaaagaatccagatgtggaagcacgcacttgcaatcccagccctggggaggtggagataggtggaccctggggcttatactcgccagctatcctagcctaactatttagttccaagcaagcaagagaccctgtctcataaaatacgggagacaacacctgaggaacaacacccaaagttgacctctacccttcccacacctgtgcatgcactcgcgtgcacacacacctgtacctcttcacacatgaatatgaacacacacatatgtgtacatacacaaacaggagtgcacaggcaactgcatgccttacctccaaactggagagagtatcacttgccttctctcttgaggacagggtccctctctagtgcctactcctgtccttccttcaggaggatgtggcccttctgatgacacaggtcatacatagctgattctgctcctgcccagcaggcactggtctccctgccctccttgtcctcatccctgtcagagcccccagccagcctatcgcttctactcaagattcagcatcaagattcctctttcctcttcacctcaggctagacacattcgtcttttttattattaattctttttgattaatttggtttttgcattccaatcccagttccccctccctcctttcctcctctccctcctctcccccctcctcccatctgcttcgtggagagggtaaggcctcccacaggaagtttactaagtctgtcctatcatcttgttgaggcaggaccaaggctcctctgcacccccacacccctgtgtctaggctggacatggtatctctccatatagaatgggctccactaagtcagtttgtacattagtgttaggtcatggacccactgccagtggcctcatatattgtcccagtcgcaccattgtcacctatattaagagagtctagttcggtcttatgcaggttccccatttgtcagacctgagacagtgatcactcactagctcgggtcagctgattctgtgggttttcccatcatggtcttgactccttggttcatattatcgctcctcccttactttgattgtattccaggagcttggcacaatggttacttgtgcagatcagatttctgcatctgattctgtttctggaagagggttcaagcttctctggggttttggattgtaggatgggtatattttgctttatgtctggtatccacttacgagtcagtgcatactatattagtctttctagttttgggttacctcacttagaatggttttttatagttctgcccatttgcctgtgaattttaggatgtcattgtttcttaccactgagtagtactccattgtgtaaatataccacattttctttatccattcttcaattgaggggcatctaggctgtttccaagatctggctattacaaataatgttgctagacagattcctcttgtataagcctttctctgtctctccacactgtgtcccaaagctctcatttgtctcctctctcccctaccggtgctatccatggtggaagcaaaagtaggctatggagggaaaattgcagcaatagtaaggtatgaatgcaaactttgagacagtcttcttctttgtcagaggcattctggaaacattcctgacctcctctgattcccagtttggccaccttgatttggagattgggaaatggagtgacagagtggttaattcatcctgatttgtccagaattgtctccattttaacactgaaagttccctgtcctagaaagtgtttcagtttcagagtgactaggatgctcggttggtccccctgagtagaccacccaggtttggtggggcaggggagatgctgagtggtaagagaggcagactttgagtctctcaacctgttttcaggctccaagaaagacacagagagagtggacaacttctgtcccttggaagagaatacagaatatgccacaatcccttatattaacgtgagtccttttccatttttttttttctgtgatcagaaccttctcgccaaggctttccttacttcacttgagactatcccctacaagattgggtagcatggaaaaaggaagggggattaacatgtgtaactaactttagtcactctgcctcccccacaccttactcatgtccttgcagttctgccccaaacctgtgacactcatgtgagcagttacatgaaccacctcttcctttttacagtttacgacggcggtctttacttcctcccaggaggttggaaactagcctgctttgtagcctattcaacttactaagtcaaaatttatcactttggcatcttctccttctcttggtcaggttacacccaaagaaactgcaagactgtcctgcgtggtcaggaaataaactccaatcatgagtctttgttgttggcaatgctttatttaggttcattgggcatccttactatttctccaagatacctcaaactactggataagccagtttaccacactgacactataatttcatattagcctttagccaccttgggagactcatagttcatgagagatatctcaatatattttgaaattcattgaaacataatacagaaaataatgcaataaagaaaatttataaaatatggataaaaggcaatggctttaaaaaactgattaataggcattattatagcagttactagcaagagcatttctatgcctaccccggaaccttctttttcttctatgttctcttacatatattttgctttctctggattgcatgtctcccttgtctagcgtatgtgactcagatgttaggtactaattgtgtttgtttattaataggaaaggagtctggaagatgatgcagcaaacacactttattccactgtgcagatccccaaagcagtaagaaccgttaaggctgactctcatcttaactgtcgatctctttcctggctcctgttcaggttcacatttcattgggattttcagtccctggtattaaaacaggccccggccagcccctcatgtctacctgcaggtggagagtcctcactccctgccagacatgtcaaggccatttagctttgtgtctgtacctagacaggtttttcagggctttgcttgaggttacccaaaaatataagaaatagatgaaaactgtgttttagaagtccaaattggtgacctggaacagacagagtgggaggagggttctagattggattgattaaagaaagtcaggaggattctgtctagagtaatgagtgaggggaagggctatctacagcttgtgttatgcacaggaggaggagcaggtaactggaggagggagattttcttgctctggctgtatcacatctgctttgcatcctccttgccaaacctcaaatgtgatgagatacatggcgtgtctcttcaccactggtgctttgcagaaacagtcaccttcttgtctgtttccctttcttctgcaaaacaattgaaaagataagaatgcttgctggtgaatgtttctttcccacctgccagttcccagataaccatcacagagactcaatattaattaaaaatgttcggccaatagctcaggcttgttaatagttaactcttacattttaaattaacccatatttcttatctatgctttgtcatgtggcttgatacctttttttagtatggcacgcccatcttgcttctctctgtgtctgctggtgactccagactctacccttcttctttccagcatcctcctagtctggctctcccactcaatctcttcctgcctagctataggccagtcagttctttatcaaccaatgagagtaatacatattcacagtgtacagaaggattattccacagtggatgctgaagatgattttcttagtgatagaaacacttacaaatttattgtaagacagctcagtttgtaaggcatggagaaagataagtttatttccctctagaatgatctatctaaggtaaaagtaaacaggaggactgtaaatgaaggagctatgggttgggatgatgggtcttctatgagagatccagaactctgttcacatgcagtgttctttcccatgtctgcccgcaggtgaagagtcccagctacctgcctgcagagccacctatgtggaggcaattaagctttgaaaatattatctagacagcagtattctctcatctcacaggagaacaaaaagaattcactattctcagccgaaatggaaacttccaccatggattgaatataattgcctgcccaccaagcccatgtatttgcgtacagatggcgaaggccaggctcaagaagtttcagggaatagtgactatgggggattgggatagagcccattcatattccatttagtggagacagcttctaatcaacgcgtttagacagcatactccctgtttttattcatatctatagtaaggaatcaaaacaaaaggaagaggaagatatggaaaacatgaagtttgataagagcatgagagcatttaaagctgtgaagaaattgggtattcacaaagcatctgtaatggctaaagagatagagagcaaccccagcctctgctctaggacaatagaaaaggagcactgaaatcgagtccttacctatcaagaactccaacttacaaaccaaaaagcccatttaaaagttttcatttaaaaggaagaatgtctggacacagagtgtccaccttcgtcacataagactgggaaagtgccggattcaccggcacaggttctcagagcctgctgaagccctgactcaagggggtgtggctctgtcctggaccagcagcagaacttggcaatgtgcatatgctggtggcttggcagacaggcagaatgtgaaagctgggagccgctgaggcatgcaccaaggttccagtgtgggaaaagccaggcgacgtatatcaaggttgatctttctgagtggaactgccgtgtaatatgaaggcaaagcctaagctgcagtgtagactctaggatactggagttgccaggaacatgacgcatctgctgagaaaactccaggcaaggaatatacccaagaaaagaggccatgtgtgcttgaggcagcaaggccatgagaacaggtctccccaaacccattggagcatatatgatgtcaccatgatcccgatacggagcttcagggtttacacttccctgctagattttgacctagctttggtctgatctttctttgctgtgccccattcctcccttttagaatgtgaatttttcccctctgccattgtacattgtaagtatgtaagtttttatatatatatttttaatgggggctcatttttaatggaagagtttgtcttccatctcataaaagacattggacaatggactgttgtgtctggggactcctgaagttcaagggcgtgaattttgcattgtgtgatgatcttgaacctatgtgagccaaggtggggatgttatagactgagtgtaaaatatgctccaccggctcatgtgtttgaacccttggtgttcagtttggacatcgatggtgttatttagggatgttatagaacctacagaagacaaggcctgcccggagatgatgggtctccaggaggcaggccttgaaggtgatattcacttctgactctggactgagctttctgcttctacctcaggcagagtcctgcccatcatgatgttaagaagcaaccatcgcaaactccctccaacacaggccaagccccttgagccatcatgccttctgataatgtatttcaatctcaggaactcaaaaccaaaataaccctctaccacaagagttgcttctgtctgggcccaaaacaagaagagcaactaatacaacttccttccagaagagctactcgtatgttgctttgggcttgggttcatttttccactgctaagaactctcctcaaacccagagtcacaaatgtgactgtgaatctgtcagttaagcctaagaaaaggggcagcaaatgctttgacatgtaagtatattttaattaaggccccaggacaggatctctcaagtccacccctcttccagaacttgagatcagagctatactaggaaactgcttgccaggacagacagacatgtcgagcacaagcagatttcactgcccaaaatgatatattaatttattaatggaatcaccagctatgtgccaagtactgtgctaaacttgcatggataattccaacacactctgctcttgcttggtgcttcaggaactactttacaggggaccacagagacaatgactattcaatcactggtgtttgatggcttgaaaacctttataggtgtttaatctttttcaacaaatacttgttgagaactcatgctaggttagtcttctaggtaaaacagacatatttcctgcctcatagagttcattttattttttttttggtgttattaaagagacctgggaacacatagagcaggtgtgtgtgtgtgtgtgtgtgtgtgtgtgtgtgtgtgaacgcgcgcatgcgtgaatttgatgtgttcccagaaccataacttatgtatcttgaatgagaatgctaaaagggtgccagggttgaaggatattaatcaagtaggcaaatatatgttttaaaaaggagaagcatgtttctaaaaagaagatgtatcgggaataagggaacgctcccaagtataagatggaagcaaaaccagaaacaaatctacaagaaaaaaaaaaagaggaagccaaaaaacgagttgtggttgatggcttgagaaaaaacaaaagctaaaaataggatgttttcccctaatatataacaattctgtcatgaccacagagggctgagctagcctctgcccagagctatgtaggcatctgcccaaggtacagatataaatgttattaaatgctgtagatcactgtatttattactctaatttaaaaaaataagtagtatttaaataaaatcagtatgtagtagggaaggattcccccaaagttctcgtacaggagaggggaagggcacataaccacacttggtgggagagaactatttacagtgcagcaagaagaagcctgggcttcaaggttgtccaggtaatgacaattctgtaatttgattcttttaaagacattgtgaaattcacatacaaaaatatgcatgaggttgcaatttgcaatagacaaattctggaaacgctctaatagtgagcccataaataaagttaaatgagcaaagactttaagagaatagggtaaagagctggagggatgactcagcagttaaaagcactggctgggccaggcgttggtagtgctcccctttaatcccagcactcaggaggcagaggtaggcagatctctgtgagttcgaggccagcctggtctacagacaagttccaggactggctccaaagctacagagaaaccctgtctcgacaaaacaaacaaaacaaacaaacaaaaagcactggctgattttgtaaaggacctgggtttattccccaacactgacatggtggctcacaagcatcaggggctccagttccagggcatctgatactgtcttctgacttctatgggtaccaggcatgcccatggtacatagacatacgtgccagtaaatgtctaatacataaaataataaaactaagttaaatctacaaaatataggttatatagccaggtctggggaatatatgactacctataatcccagcacatttggaaggcagagacaggaggctagccacaagtttgaggccagactacatagtaagtctcaagccagcaaaggcaatatttgaagattttgtggataataattatcattattatttattattgttgttataaatttatattttttctaaaattaaaaaattatagtttgtagtgtcacatgcttataatcttagcacccaggagactgaaacagaaggactatgtatttgaggtctcttgggctatataatgagaccttgtctcaaaaactacaacaaaatgacaggccacacagttcttataaagctagaagtatcacagtgggtaaagtaatatgcagaattgaagttctctattgaaagaaatgcctgcctgaaaccctggcttccagcctgtcttagtcagggcttctattgctaagacaaaacaccatgaccaaaaagcaaactggggaggaaagggtttatttggcttactcttcagcattgctgttcatcactgaaggaaatcaagacaggaactaaaacagagctggatcctggaggcaggagctgatgcagaggccatggaagggagctgcttactggcttgcttcacatagcttgctcaacctgctttcttatagaacccaggaccaggactaacagtccagggatggcaccacccaccgtgggctgggccctctcctattgatgactaattgagaagatgccttacagctggatctcatggaggcatttcctcaactgaggctccttcctctgatgactctagcttgtgtcaagttgacacacaaaatcatccagtacacagcccaagcaccacataactgggtgtcatgatttatggctgtcatagctgccctccagaggtgttggcaagatgatcagaaattcagaatcctctgttaactagttcgatgtcagcctgagataaaggagatgttgttttaaaacaaaaaaactaaaaagggagaagtatgggaggaaatggggagaagaaagcagagggggaatagccaatgcttctctgacctgcaattaatatgaaatatatatatatatatatataatatatatatatatatatatgtgtgtgtgtgtgtgtgtgtgtgtgtgtgtgtgtgtatttttttaaaaaactatgtatgaaaaaatgaaacaaatatgttaaactattaatactggttgctggggacagtgaaagcttaagcgtctcgttatttgtttttcctgtgtgtattcattttccaaatgcttttcaattaaaaaaaaagtgtattgtatagcatggtggaagaagttttaaatagattttcagtaagaacaaaagagttggtgtctgctaagaagaactgaaggggaaatctaaaacccacctgttaaaagtgtggtgaaggaagatggaaaatgccccctgtgggagaatggaggaagaccctcccacagtgatcacaggaaaagattaacttatgtcagacagtgtgacttgaatctgtggtaagttgtgggcaggcaaagagggctgggccttaaactccatcgctcccccatctcctctgttctgggaactaactcatggtaaaaaattaggactatcatccatcccacccactccaccccaccccaccaccatcctctctctctttaattaaatgggacctggagtctgtgcactcagtatttcacaatggtggctgcaaaaaggtcccttcctcctcagctcaagctgcaggcaaaggaaaccaccagctcgtcagtgtgagaagtcacaccatctcacaggcccaccacatacagccctcctagctatgtggtgttggacttgtgaaataaaacgtgagtgatggattctgaaatgtagaaccctaataaaaggaagcagacaaaagaagcaaaactatcatttccggaaggcacctgctcatgcaccactgagtagcactaacgccaggcactgttcacaattacagagctaacaacagtgagccagaacaggggtctgtgcccttagggtgcttataacataacatacatgacatacagtggtcacctacaatgcgggcgggggggggctttcctgggacaagggaatggtcagagaatctccaattcaataaagattgatacgaaatgtaaagatgaataaccagaagacaggaacatgaaaggggctccatgtagtcagagagcacagtgcagacagccagtggtgagaagacctgagagaaaagtcactatggccagcccataaagatctgtgtttataaaacatatactagttacactgtgagacaagactgtaagagacaaagctagatgcaggatgacatcaaagaggctactgtagggatccgtgagaagtagcaggacgtggaaatggggtcctgggatggacatggaggacaaatggtttcaagagacagatctcagagacaggagacgtctgcctccacagctgccttaggggtgttcagtgatagaaaagaggagacagggagactcccctttactagagagacaaaatctgggcctaacaatcatcaagattacagaactcatttgtccctttgacctgggaacccaaaaaagtcgaccctcggccaaaaggtgaacaagaagtatattagccttagccaactttaaggcatctgaaaattggaaatgggattttagagacctgatgttgctggcattgaagatcatctctagaagaaaataccactattaagtctcaaggcattcctgaaaactatctttcttaaacaatgttcatcacacaatcaaaaataaccaggcacagaagggaggcaaaaccccacaagcaagaacctctgggtggggagagacaatccctactgcagcctatagtcagtgtcacttcctactcagagtgagggacacactgggaacttctttagtccatgaatctgtgggcaaactgttgctatctggcttcattcaaagtgttctttttatttattgccctctgtcaaattggcaaacaaaagaaaaggccagataaactgtaaaattatgttatataatatttaatagagacttgactatataccaaagattaccctaaatattttatatatggttatatatgtgcataggcataataaatatattaagtcatgaccacattgaaacttctttgcaaagttcaagtctttggcaaagtacctgtgaccttttccacaagaatgggttctactgactgagaatcagtgctgaggataatggtccagaagggaagggtttgtaataagcatgatagtaaactctttagtaaactacataggacccctgtcataagaatgggttctactgacaggggaacaatgctcaagagtctgtggggttccggtgacacctggctctacagaatagcaaggatcaccaggttacaaacaacatccattccagccttctgggtggaaaaacaggtgcaaatctcttctgttgaaaagcctgcatgtggctgggtgttggtggcacacgcctttaatcccagcactcgggaggcagaggcaggaggatctctgtgagttcgaggccagcctggtctccagagtgagtgccaggtatgacattatggtttctccagtgcttatctgtgagcactaggacttcatgtgtttctacagctcatgtacacacatgtaagactgtatacaaagacatgaggcagggctagggagaaaactagaggaatatgagaaacccaaccttgctttcttatagcccactcttttttttttttttaatttagttctcctctcagacattacatcctgaccaagtttcctgtcaggagagaccctggatacctgtaccgctgaccacacccaaaacgcggtccaggtatctagggtctccccctacagtttcccctccctacactcctcccattccttccctcgccacctcccctctccttgagatactctcatccaccatttcccttcagaaaagagctggcttcccagggatatcaaccaaacaccgcacaacaagttccaataagattaggcaaaacccctcatatcaaggctgaacaaggcaacccagtaggaagaaaaggatactaagatcaggcagaagagtcagagacaccctgacacacactccattaggagtcccacaaggacaccaagttacacaaccataacatgaagaggaaggacctagctcagacccatacaggctccctcatcgttacttcagtctctgtgatcacctgatttgttgattctgtgggctgtgtcctcaaggggtcctcaacccctctggctcctacaatccttcctctccctcttctgtggggttctcccagctctacttgatgtttgactgtgggtctctgcatctgttcccatcagctgctggatgaagctctctgatgacaattatgctaagctctatcaccatagcacaatatcattaggtatcttattttaacctgtcatgtttggttctatccttggtccctgggctgtccaacctctggttcctcaccatccaggcagtgtcaggcacaggctccctctcatgatgtgtgcctcaagttggaccagtcagtgactggctactcgagtccacaatttttggaccactattaccccagcacatcttgcaggcagaacacattgcaggtagaaggtttttttggctggattgatgtcccagtcccaccactggaaaccttgtctggttaaagaagatagctggttcaagctctgtaacccccattactaggagtcttccttagggtcgcctttgttgattccagggagtttccattgcattaggtttctatcttgctccccagtccaatcatctctcccagtactctcgtcctcgacactaccccaccccacctgatctcttctgtccgcatacccgctcaccctcagtccacctgtaaaatctattctatttccccttcacaggaagatccatgcatcctcccttgagccctccttgttatttagcctctttaggtctgtagattgtaacatgatggccctttacttaacagctaatatccacctgtaagtacatagcatgtttgtttttctggctctgctaacagcccactcttgtaatggtcagtatagtcttgagagctctcactcgttctgtcattcccgaaaggcaagcatgaatgtcttccaatcatttctaccttgaatccaagctatgaagaaacagcaatctaaattggatatggattcagagtatgtacaaccttctgggaaatctttccagagctttccattgaaggttatttgctacagtttatgttcctcaaaacccatgttgaaatccaagcttctaccatgatgataacagggtaggtccttgagaggaaagtaagtgataagcatgagtggaatttgtgctcttataaaaggggttggtgatgtcagttggccctttaaccatgtgaaaatagagcaaccatgctccatccatgaaaaagagatccctccccaaacaattcatttttcaacatctttcttagaattccaagttgccaagatacaaacaataattttatgtccatgaagtgtttagtctgtggtattttgggtatccagaagaaacagactcagtattgccaagtcctcaaaaaccattctactatgttctatcaagtcacctgcttcaagatagcaaggaacatggtagtacagtgaagagcttaggcccactgaacagcaaagcaagttgattgacgagtagcaatatatacagacaaccatgatggtgaaagaggcattctttatgtccaaatacaccagctaggtagaattactgtgtctaggaaaagcacattcatatctaaattgtatcccagcaagaacacaatgctgccttctccatgattaaagcaataaatacagtgtcatcaagtgccaccacagagctggtcagtcaactcagaaaatgtcatttggttcatgtctcattcaactgatgagacaaactgttagagaccttttgttttaacttggtcttgcaatattcaatgcaggaggactgcagtttactatcctcatatccttaaatttggcttgatccagcttcatgcttcttccatggttattccatgcctttgataaccagtcccaccctaacttccagactatgagtgaaaaatatcaagcagttccttgaggactaaagtgcagctcttcatgggtcccacattgtcaagggcttacaggagctgaacctagtcgtggctgtagaagcaaaaaaaaaaaaaaaaatggtgcagagggggctcttaactcctaaggtgaactgccactgtcttgcttcccacaaggcatttctgtttctatgggtaatgcaatgttaatcccctctcagacagaaatgtagagtttgagaccattgtatgttgagggtcttatgccttgtgggtaagaggccacttccaaagagatttgcttggttggtggcagcaattccataggcaccttcactcatgttggggaggcctcttccattggcaaaaaacaaaaaaaacaaacaaacaacaaaaaaaaacactgcttagaatttagtgactctgtgctcacaatttttatcagggttatctcacacattcctatcccaacccacaaaatcccattcttccaagtggtgcctcacttcaacaacagacaccctgcaagacaggacttcaatgaaggcaatatcaagatggagttctatacttgctcttcagtcccttcgtcgctacaggaaataaggctctttgtcgggaaccacctaaaagctctagttacctctacagcgcctgaggtggaaatgatccctcgatagagcacattctcttcatcattttactcatggattataggagcagccagtcctaaatgaagcagggggcagggagaaaagaaaaccaccgtagtgagttagcttagaggtctgggaaaactaaattcccatgaatgtttgcaagaatgatacatagaatcaagtgaattcttgcttcctatattaagagtaaccaaagcaaatatatctaaataaatggctcaatctttgcaccatcagtgcactgattccagaagcctccgaagcaaattcagaaaacttatgtttagaaatatgtccctgcaggagcgggctatgaagagagagatttacttaagatgagatttattataagaattggctcacatggctacaaaggccagtagagcccatgatctgctggttgcaagctgaagaatcaggaaagccactgtcatagttcattctgagtctggaggtcttgaagttgagaatttgatggtgtaagctctggtctgcatctaaaagttcatgaacaaggagttgatgtctactggcagaaagagaaacatttccgctcaagtagagaaaccacattttccctttctttctctttggtccctgaacagaatggatggttcctgatgtcatcactgagggcaggctaaactcttcaagaaacatcttcacaaatatatccaggaacaagattttgcctgccaccagggcatcccttaacctaaccaacttgacacataacattacttatcaagggaccaagaattatttccccatgcctttgtgtaaaaggattatataaaaggttggcacagcctcagaggggcagcttacaacaggaacaatcttgaagttccttcatgaaggaaaaagataaaggaagaaatgaagctgaggccaagaacagaacagaggctaacagatggagtctaaatttcttagatgggaccaaggagatggcttagtgggtggagctgtttgccatgcaagtctgaccactagactttgatccccagaacccacataaaggcggaggggagaaccaactcaacaaagttgtcctctgacctccacaggcatgctttggcacacatgccttcattcacacatcgaataaaaaatttttaaattcaaatttctaagatgggtgaacagcaagggaagtaagtgtgcaagggaaatcagagagtgggagttaggctaattgcaagccttcacctcttcctcctccctttcaatccattcctccagcctcacccccgacttcgtagcaaaccacctgccgcagccttcctccccaccttgtctccatctccagtggatcacacagatctcctcctccaaacatccttccctccactggtccatcactttatcccaatgtccagctccagtagatattccctgagaacccacaggccgcctcgcccagggaagaaggtggcctaactgtgtatcttcacctttccctcctctcctctgaatccaatccctctgcctcatccccagctctgtagatgaccacctgttcagtctgcccctcctctctagtgtgtaaatgttttgtggcaattacaggagcaaagaatgccacaaaaatcacaccttgcaacagacctcctgtgagagatttgggggcggggtaggcaaaaggctgcctctgagtggggatggaaaagaaagagagcaggctatggtggtgagggctttatagagtatggagcaagtacataaggaaaatatgagaccacggcagtggaaacacgtggcattgtctgctagcagggccacaggctctgagtcactgaaggcagggtgggggatgggggaacacctggttctggaaggtgagtgagtctcagtttgcgaacacagtggacgatgggaatattttccttcaactttcctccccactcaatctgttaccccagctcccaactccagcaggcattccccagaaccaccagccaagcctgccagagaagaaagtatgccagctaagcaggtaggtgagccttagatcttcacttccctcttctcctctatatccaatgccccagcctcctccccagctgccctctcctcagactctgctcttgtagaccaggctggtctcgaactcacagagatccgcctgcctctgcctcccgagtgctgggattaaaggcgtgctccaccaatgcccggctgacatttctgttcttaacacctatgccctgaacacaagagcacctatgttcataagagaaacactactacagcttaaatcacacactgaccctcacactctgatggtgggagacttcaaagccctggtttcgccaatagataggtcatccagacaaactgaacagagaaatgacacactatgaccaaaatgactgacagaaacaacttaaaggagaatgatctattgggctcatggtttcagaaactttagctcatggaagagagggggtggtgctccggctccagtgatgacatcacgtgatggaggagagctatttttatcgtggctgatcagaagcagaggatggagttagaaccaaggaccatgctacaagctctgaaggccagcccattgagcccagcttccaccagctgtgccctaccccttgagggttccacagtctccaagctagggagacagtgttcaaaccaagccttcaggggaggggtgggggtacatttcatattagaatcataacacctcagagagtgggagagatgtcacagtgagtttccattttcttaattttactctccagtgaagaaaacaaaactctgccaagttggccatctaccactgaacaatatccctgccttaatattatttcaaaatttcttttattttctgcttccttttatttttagccgtgtgtatgtatgggatggagggcacaatgcaatgttttgatatgcatatgtaattaatagtgcgtgattaaaccaaattaataagaataaagagagtaaacaaaagcaggcacgggtaaagactgtagatcgcttcctgccatgtttccaaccatgccaagttgaaaggaaaagccaaaggagtccacccttgccggccagaagagctttgccatccgtccctgtcagaccagttctaggcacacagcccaagaaggttgggatttcttatgtgtgtgtgtgtgggggggtgctctgcaaggcagagtgaggatggggaggtgccttctctcacagagccccaggaaccagcagaaacccagctgagtctgggtgaaaggaagcatgatagcctgtgaggctgaggacagagctgggcactgtgatggtagctccagagtttgcatctcctgctaccatggaaatactcccttagacaaactaatgaccctcttcatttcgtctgcttctagatccaagaagaaggcaatccagggatggatggaccaaggatgccaggaataagagaaacacagaaagaaggcatgatctgagcagaagaaggtgacgggaacagagctggagctctggcggacgggattcttgacagtccagcggtagctgtcactgtcaccagatgtccatgaagacttggagagtggttctcccatgggacacaatttccccctggccatgatggtcccagtggtactgaacatcctgtccatcatgatctggaactggcagtgatactgggcctcttcggcctctctgtgtcaagaagagaagttttaagctgtgagaaagctggggattggccaagcagggcataggaaaagctctgaaggaccaaatcactctcctcaccatagacttgcaggatgaagtctttggttatgttcatcaaggagctacaaagaattatccaagctttgtagggcctagagtcctgcagccctgaagggctggtctgaagagaatagccatggtgaggaatgctcaaccagcccctgtagggctctgggaaactgctttgcctcccagtccaggggtagattgtcacacacacacacacacacacacacacacacacacacacacacactggtgtcaatcactgtcttgctgtcttgcagtggtgttcttggccctgtagcagagaaaagaaagaaaacagagcatctgtgtcagtatctcccactcactaggggcagccataggccctgccactcctgcctccccatgaccacacaggcctgtgctcatccatcccagccccaccttgctcttgcaaaggtgttagcactcttcctcagggttcctcagaggaccaggattcctcctccaacgtctctgtccactccaaagttgctatgaaaggtgcatactcagattcccaggcagccaggttcctgtgcaggagtgtgacacagagacagggtgggagctgctgttactgattgggttcttgacaatgtaggcaaaggtcacggcactgtcctcaggactcgtggaaacactgagaacagaccctccatgggacactacagtcctgggatccaggtgtgaccagctaaaggtcatgttgcctcatctgctttctggtacatgtcagtacaataatgcagtgtccattatcacccatcctggagctcagggtcataggggactgggccagcttgtctgtgtgtgcaaaagggacaagctggggactaggagaagtctctgggcctccactttgcaggaaaggcagcacaaggaattgtcacccaaacctgcgtcaccctgagcacacataagaaactgcagacagaggatctgcccacatctcttctagaacttcgactattacaagattatgccacttagtatctcaagttatttccatgacgtaagcaaggcaagtgtcgcatttattccatgtcatgggctcaggatgcttggacaacgtgcccaaagtctcacctacctaaatggtgaatcccaaattcaaatgctgtgcctctgatcctattcctgggttcttaacccctgtccagagtatataaaaggagtgtggaactgtgttgtaattatgccttttccccaggagggggctctgtagtatacactgggcttctgtatagtgagtgaccagagaatttgcctgtgtgtttcaggtttctcccagtgctttgtcctcccttagatccacatgtcctctcttctttcccagggcacatgtaccccattctcttcttcaggtttctattttcttgttattagaaccagaaacattttgggaagcagcaagagcagctatggaaaaaaatgaacagactagtttggacatagccggagcctggagaaggttgatctgttgccagccatagctctgtgacctagccactgacagccccaggagcagctggtcagttgtgccaaagtgtcctctggaagatggcaagacttctactgccaggcgactctctgctgcttctttccagggggtattccaaaagacaagctctggagaaagcccttctcctttgacttctgcagtccctctctgtcttcgttggtggaagatgcaggcatccagagggaggggctgtgtgtataagactcaccctgactggtcagcaagcttcatctcttgctactgatattattcttgagctcatcctgctggacacccatcagcctggcaagaagcctcctcttcagccctgaacccaccctagtgagcagcactgcccaggttcctgcagcctcaaccgcagggcttcaaggatcagaccataaacagcctgggccactttcccaacaaaactgcttcccacagtcttgcacacctggcaggggttctctcatcagtgtgtccatccaaggagtatttcctgtcacgcagctcaaagaaaataagaaggctgtctgccttccctctctatatttgttttccctcatctatatacaaccttctctagaagatctctgctatggccccttgggaatcttgttcaccacccttaggcaaagctggagccacaaccaatctgagtcatggccatgaccaaatcccagaataggagaggataggcagggaggccaatgaggtactgtctcgaggccacgctcccttgcctctccctccctggatggctgtcccaggtagttcctcttggtttggggttcctgacccccatagagcatagatgcagagcataacccatccctggcccctcatcattcccactccagcccccacaatagccctctcaccccagctatagcctagagcagaaacctcaatgtcacatgttccaccattttcatcgccatcacattggcccttttatttcagtatcatctttgctggtgttggggggaggggcaaggctcttgtagccctggacctttgatcccccattcctttctatgaagtaataaattaattaaacccaaaagtggcttgtgacctcattactagtcaggtgagtcgggttctggcctttccaaggtagtgtgtacttcacacaagggagggtctaggtcctgctcaaaatgatgtgacagactttgaagatcccccatggaaggccttgccctccctggggagcagaaaggggttgggatgtggggtgggagcaggggaggaagagagggagaggaaactgggattgacatgtaaaagaagcttgtttctaatttttaaaaatgtacaaataataaaaaaaaaaggtagtgcgtacttcaccacacacctacagtttcctaggtaattccccttgctaaaagtttttaattttttttgaggaaactaataggtccccctcatctgtttagtgtgtttattctcagcaaaatctagcgagtgcttctatttcaacagtgggagcactcagaaccccaggaatagattgtggcaaaacccagttctcaggtcctgaaatcattcattatctgctggctacataggagttctgcttcagttggtgtgaagcagttcctgggccatcttgggttttctactgctgtgatgaaacaccatgaccaaaaagcaagttggggaggaaagagtttattcaatttacacttcagcattgctgctcatcactgaaggagtcaggacaggaactcaaacagtgcaggatcctggaggcagaagctgatgcagaggcaatgggagagtgctgcttactgccttgctccccatggcttgcttagcctgctttcttatggaacccaggaccaccagtccaaggatggcaccacccacaatatgctgggccctctcctgttgatcactaattgagaaaatgcttatagctgaggctccttcctctctgatgactgtaacttgtgtcaagttgtcacagaaaaccagccagtgcaactgacaccttgtcaacttgacacacaaacacaagactattatgccaccacccttcctttcttattcatccccaaaaacataaataactttaaaagttccacagtctttacaaattcaagcccattaaaatagccaatctcttttgaaatccaaagtcttttaaaattcaaagtctctcaactgtgacctccagtaagatactttcttacttcaagaggggaaaatcatatatagtcacaatcaaatcaaagcaaaaccagattccaaccatggaacatctggaatccactcctgatcttgtgggctcctccaaagatcttgggtcacttctccggctccgccctctgaagcacacatagcttgtcttctaggctctggctggctccactccgctgctactgctgttcctggtagccatcccattgtgctggcatctccaaaccactgggttctcctgcaactgggctgcactctcacctctcataggttctcctcatggtgccaagcttcaacttctttgcatgacccctccagtcctgagcctccaactgtcactggggatactcattcaccaatggccctgtaaggccctgcatcctccaggttcagattgctaatctgcccagagaagtcagggcccacaacactcacgtgaccataatgtcaggatctttggctggtaaagtgtctagctccccagtttctaccacagtgatagagacaaatgtccttggctatgaacgggatgttcaggagattctgtctatctgctatccagtcagcagcacgagggatagagtgactgactcccccagggtcccagttaccaccagggattctgggtcctctctggaagcccctggccctgtgaacacagaagtttcaggtcattctgaataatcagaaggtctcagcatgtctgagagcaagccagggacttattaactccgtttctgaggtgaagaacaagagagtcaaagagtatatataggtggtttgctcagtaccacacagctagatggcgattcaactagagtaagtgtgcaattcccctccttaccagcagagggaagtcttcaacacagaaacagctacctgggtagagttcctgcaaaatacctaatgatccctgctgccactgagtcatccatcctgctgatggatgaactgaagtcagaatgcacctgtagaggttcttgtcctgcagcatccccagagctgcgggcccaaaacagctctttagaggtccagccatgactcctgggaacaacatgggcaccctggggtctgtgagctccagtatggttttaaatatgtgcttcatggtcccctggagaaggggaaagggtcaagatcccctgagaaaattaagagcacggaaagagggggcagggagctaggagaatgagaaggccagaagaggaaggatgcagaggtcatgagggagcagaaaggttgagtcaggggaagactataagaaagggtatgtgataggtagggttttagttggggtgggtggtaggagaggaagggagggagaagggaactgggattgtcatgtaaaaaatcttgtttctaattcaaataaaaaatctgaaaagaaaaaaaatatgtgcttcattcggcctcatataaagagctgtgtatgaaccttcttcaagaaccatgagtccctccagggtaagagaaaatggagagtaacaaatatctttaataaggtaaggtaatgaaacaccttattataaatatgaggctgactgggttcgcctcatagtcaggtgtagcagggtatgcgtcaggcttacagtgcgaagcccattccttgactccagtgaagggaaagtgacacaagggagtcaaatacaggacagagatcccaacacgtggattcttgtctgcgtgccttatgtatgttattttatagaaccctcccaacaaacatgtaaggcatgatttctattcccattctacagataaacaccatgagattcagagaacctaagagctcgcttgcccatatccccaatgagggaataatgggggaaaaccagcaaacaaacaaaagaaccatagacccttggcccccagcctcatatcctgttttctacactgcttctatagcagggatcaccgagtgaagtttctcctcaaggtggctaaccgtggttgtcaaagtgacacactgaggaaagggaacctcaattgaggaactgcctccatcacattggcctgtggccatgtctgtggggcattttcttgattgctaattgatgtaggaggatccagcccactgtggatggtaccatccccaggttgtgaatttggactgtataagagaggcagttgaatgtgagcctgggaccaaccagtaggcagccttcctgcctgctttctgtttcaagctcctgccttggattccctagctgatggactgtaacctataaagtgaaaaagccctttcttcctcaagtgtttaatcaatatggtccataaatcacatgtactctctcttcagcaaacattgtgagtaaacatgttctccccagatgccagatgtactttcttgcattttgcaatataaataggccacaaaaaaaaatccctactttccaagttctggttctatcttgcttaacaatcccttgcacttgtctcctctgttttgtgtaagtagctaaaagaaacaaggccatactctcaacactttttaaatatttatttgttatttacttatttatgtgtagatgtgtgtgtttgtatgtgcaggtgcatgtgggtgcccgtgaagaacaggggaaggtgtcaaatcccctggagctggagtcacagcaaatgtgagctccccagtgtgagtaccgggaactgaactgtggccttctgtgagagcggaaagtgctcttaaccactgacccatcaccagctccctaccttcaacattatgcttagaaatattttttgttacttaaacattctactttccacaaaacaatagagtgcaattcatccaagttctatcccactttttataaacattcatttctctccagtttctaatggcatattcttaatttctgaatcaccacaaagacattagctgttctcgtttctatcactattatgtttatgattacatatataaaaggaaacttattatcgtgtgtgtgtgtgtgtgtgtgcgcgcgcgcgtgtgtgtgtgtgtgtgtgtgtgtgtgtgtgtgtgtgtgtgtgtgtgtgcgcgcgcgcgtgcgtgcgtgcatgtgtatgtacttacaatgcccctattttctttctgagtctttaaaaactggctttaacatcatatttctaccaaaaacttcttgaaggcaacatgggcttttaccaacatgcatctcaaaattcttccaacctctacctactagccagatccaaaagtgctttctgtatttttagatatttgttacaacacctaacttttgatatcaaaatctctattgatttgctaatattgctactgatgtggctggaaatgttgagcaatggttaagagcactagctgctcatccagaggatccaggttcaacttccagcacctacatggatggccactaacaattgtctgtgactcagttccaagaggatctaatgccctcttctggcctccatgtacactgcatgcatgcagtgcacagaaatacatgcaggcaaaacacacatacatacagactttttaatgtgttattggttgagtagaataaacaatagaagtgtattttcctacagctttacagtctgatcaagacatctgaatgtttggtttcttctgaagtctgtgtttggattgaagatggctgtcttctctctgtcccctgtctatgtagttggtgtcctagttatcttcctctaatgaggatagcagataagattagagcttactctaagttattcacccccacttccaaacatgaacctgtctccaaatgagccacattctgagatgttggaggttaggaatagaatataagaagttttgggaaaaactactcattccataatctttctactagtcaggtagtttgacatctttgttgatttgtagggtgttctgtatatattagaaagttttgtgaagctaataaatttagaatagatcactaacatgtaacaattttcatatgtatcactaatgtttaataagttctagacagtatgaatagcatgctgtcatgtttatagctatatctagactatatctagaaaattcagtttaaaagtcttactgtaagtattgtgcactggttgattgtggcactggggtgaatatgaccaaattatacactatggaattctcagacaattaataaagatactactttaaaaataaattcttagtagtaactgcttccaaaaattaatggggaagaagaaataggtgttgaggaccataatggttcctttgctaaaatcacacacccgtagagatgattactggaactgaggggtcttctgtctactgaagcctccgggattcctcaggtgttgactgttaccacttgaatgtgatctaccatgaagatgggattattttccccattctgggaactcagaaagaaaggccagataaaatagtaaagccgtggcaggagtaaaaccagaagccaatgaaaattagttgcagacacctattactcaaaagcagtggttctcaacctgtgggccagaaccccacagggatcatatatcagatatttacattataattcataatagtagcaaaattacagttatgaagtagcaacaaaataaatttgtggtttggggagtcaccacaacatgaggaactgtgttaaaggttcccagcactaggaagcgtaatcaatggctttccaatttgacctacactaaggagtgctttcttgacaaattcttgtccaatactcccatagcataaagcatgtaaagtagaatcgtcccagcagatattggggtggagagcttaggtaccggcttttgcatcctcatgcccattccatggtatccccaaattaccaccttaaactacagagctctggcactctcaggagtcccttactctgcctactcaaaccaaaagatgcttcatgcttctaaaaactctctgtcacatctcatagaggagatctgccgaggagatgggggtcagaggatggactggggctgaagtcattatacaacgtagactttctgagacagaaagtaaagcccctccaaaaaatgggaatggaaaaacactatcagtagctcgtcacggctctgccatgttcaaaagtcaatgtaacctcattgccagatgcatggactcaggtctgactggacgactttgaaccctgctttttttttttttttttttttaaccgatgatagcatcttgaataactcaaactctaattttttatttcccttatctggaaaaatggggttgcttcatctgctgtgaggaccaaattggagtgatgtccacagtggctactcagtgatagttattgttgttgactattagaacagctcatactttatttttcctcacacaaagccagagaaagccctgggtagtggcacgaacaccagagaccaagccacttgcattcaaaccttggctctgccatgtaggtggtgccacacttaacttttatgtaatccagttccctcatttctgtacttcgtggtgttttaggcaaattaaagacatttggagcattgcctgacacaccatagatacttatcgaatggtggatttttttttctacatttgagtcaaatgagctatttgatatgccccaaggaaaggttgatacccactcattgtgccatgttagttacttgtaacaggcatgtgttctgattgaactctgcctgggtcaatgcacttattaagtattctgaatgcagcccttcctcaagggcaggtgctcctgtctcacactccccacacaaaacacatcccatcactcaccaaaagcatgcctttgctttaacctttgcctacctcaattctggcactttcaagggcctccttgttctaaccagaaaccacctccttccacctcagcctttccttacacctcccacacgacacctatcaaaggccaccttacatcagtggtttattcaggcatatggctcctctcccccagctagacagtgaacccccagaaccagatacactttatctttgtgtttccccaggggacctgcctgtgtccttggcattgtttatccagtggtccagttctcttcactaaagtttctgagaagaccatcacacattacatctagtgaacatttacatatcagatgaataaattacttggtcattgaaaaggagtgagggagagcagaatggagctccctaatgggagacagatgaaaacccctccagcctctaggatagaggtcagaacaagttgggtcagctttttaacttttctttagtctatatagctttcttgccttcttactccacagctggttaggtggctgggtgactggcccctaatgttctcctctcctctttttcatgctccttcctctctcttctctggagcctttatgtatccacctatttatcctctcagcatggcagcctcgcctatccctttatcctgcctagctattggatgttcagctctttattagaccaatctggtattttagacaggcaaagtaacatagctttacagagctaaaggaatacatcaaagaatacaacacacccttgcatcattaaacaaatattccacagcataaacaaatgtaacacacttaaagcaatattccacaacagtgggttaaactggaaagctctcatttgatgactaatgccagtctgctactcacctgctacagggtgaaaccccaattcctcagaagaaagcaaactcaaacacaatctactgtgcatacagaaacctaaccagatgagaaccattttctttttctcaaacctgtaaggtaagacactgtttccaaccattttatctggaagtcttcgattcctgtggctgaggaattcgactatgctcaaggaagtgcagttctgatacattttatggtcaacagagatgtctgactcacaactgtgtgaccaaagtctttgaatatttaataactgatttaatatctgatactgattattcttaacatccaccataggtcaataatactaataaatattatatatacacatatataatatatttgtgttggtttattatggtgttcaatagatctcttttttaagatttattgattgattgattgattgattgattgattcatatacagtatcctgtctgcctatatgcctggaggcagaagagtccaccagatctcattatagatggtgtgagccaccgtgtggttgctgggaattgaactcaggacctctggaagagctcttaacctctgagcctcctctccagctcctcaatggatctcttaatggtagaatttgctaatgaataataataactgcagtaactaacttttacagaagtcccacagttcataaagcattgacaaacttgttcacctatatccttgtaacagtctctggaaatgtcttgtcattcacatttgaaaggtgactcagagttactaatttaggctcttgtcagagttgatgataattgaaagttccagtactacaaaccacaggcacttccgtttttaaatgtttccgtaaacgtatttatcatgtgctgagggtgttcctcccaataaccaccaccttccctgttctcacccctcccctcccaatagttcccttggttcccatagacaattttacttttactttcatgacatatatacacacatactggattttgtgtatctattaacatataaaaatctagtaaccaaaaataagagaaaacatatgatggctgtcttttctaagacttccttaatgtggtgctttgaaaaaaaatagcaccaaaaggaacagcactattaagaggtgtggccttattgaagtaggtgtggtcttgtgtcactgtggaggcgggctttgaggtctcttatatacccaaaccatgcccagtgagacagatcacttcctgttgcctgcaactcaagatgtaggaatctcaactctacctctagaaccgtgtctgcctgcatgctaccatgttgcagcatgatgataatggactaaaccactaaagtgtaagccaccccaattaaatgttttcctttataagagttgccttggtcatggtgtctcttcacagcaacagaaaccttatctaagacacttaactcacttattttatctccagttgcattcattttcccccagataacatgacctcattctgctatatggttaagaagacacccatagcatataaatataccacattttctttaaccattcctctcttgttggacacacaggttggttccataatttagctactgggactagtacagcaacaaacaaaatctgtatcttcgatgtgttgacttgctgtcctttgggtaaatacccagtgggtgggatgactgggatacacacagtgaatctaccatagttctctgttgttgtttttttaatttttaaaaaatttatgtctctgaatgttttgtctgtacacttcacgcatgcagtgcccacatggacggaagagggcatgatgtccttcggactagaattacattcagttgtgagctgccatgtaagtgctgggaattaaacccaggtcctctgcaagagcagctgtgctctcaataacgaacacttactccataccgtatgtgatttttaagacatctcagtactgtcttccattgggactagatcagtttatacacccaccaacagtgcagaaggaagggttccctttgtgcacatccttggcaccatttgcctcttgtttccttaatggctgccactccgactaggtaagagggaatctcaatctatttttttatttttatttctctgatggtgagtgaagatgaacattttggtatgcttttaggcactcagtggcggggccgggggggggggaggggcgggggtggagattctctactcattttattcatcaaatgggttgtatggattttttttgttttgggttgatggggatttttttcagctttttgtatattctagattatcagtcctctgtctctgtaatatagagattgcaatgaagctttcccatccttcaggctctcttcactcatttagctgttgtctcttctataccaaatctttttaatatcttgagtaccctttattgattattagttcctgagcaactggagtcccattcagtctctaccttgaattgtctctccatttttttttctctagaagttacagtttcaggacttacattaaggtctttgatccgtttggggttgattttatgcagagtgacagtctagtttcatccttctgcatgtggacatccagttcaccatcactgtttgctaaagagatcctcttttctcccgtgtgtgtttttggtatccttgtcaagactcaagtggctgtagctgtgtgattttgcatctgggtctcctattctgttcttttgaactgtgtggctgttttgtgccagtaccatgctgtttttgtctctctgtggctgtaactggaaatcaggtactgtgatatctgcagcattactccttttgtttgggatgactttggtgatatttgtgcttccatgtgaacttcacgatttttttttttctgtgaagactggtattggagtttgatgaagattgcatcaagactgtataatgtttttggtaagatggccattttcacgatattaattcttccagtccatgaaattgaagatctttccatcatctggtgtcttcaatttccttagtcaatgttaaattttccttgtaggtatctttcacttcttcggctacctttattctaaggtttcattttgttttgttgggtctatttgttttttctttgagttttatttagcagcaactgtgaatgatatttttctcctgatttctttctcagcatgcttgtctgatctgtaggaaagctgctgactttgtaaaacaaagttgtatcttgcccctttgctaaaggtatttataagttttaagaagttcttttttcttaaatacaccccaacaattattcttgctctgagtctatctgactactccattctcatttccattgaataacacttttgcctttgactctacctccccaatttcacctaccctctgtaaacactcaaaaagaattatttaaactctaattccaaacatgctacttactgtaattaatgatggagtcagcaatgtttattagatgcctcttttagccaggtggtgatgtcgcatacctttaatcccagcactcagtgggcagaggcaggcagatctcttgagtttgaggccagcctgatctacacagagaaaccttgtctcaaaaaaaagtttttattcacccatgattggcttgagcactatgcggattcagcaccctgaccctgagaatttgtcattgtatctgtcatttgatagaggatgttagagtcaaatctgtcagtgggagaaggggggggggaagaacactacatactttataaactgtgaaattccaagtgtttttcagatgctaggagtaacagatgtcactgcactgagaaacagagcagctgtcagtgcactgagggatagaacagatgtcactgcactgagggaataaagtgtcactatgctggagaatagagtagctgtcaaagccactggggaatagagtaggtgccactgcactgagggatagagcagctgtcactgcactgagggaatagactaggtgtcactccactggggtacagaacagatgtcactgctctaacaggtaagacttcaggaaaagaaagttgaagtgggctttaaaaggtggacaccaccaggtatggtggcatacccttaggtagctgaaacaggagaattcccagttctaggccaactgagctatacagcaggaccctgtcaaggcagaggatcaagaagcagaagacaggatggactcagaaaacacctgttcagatatacaagttagctcatcatgcctcctcctgacctcaagcccactgtgtaatgcttatggatttcgatgttggccttgggaacaaatctgtgtaatttacaatttttcagagctgctttcttctccagcctagttctttgggtcaaaactgttcaaacttaaaaccatgaatattgatgggtctttgctctgacatttaaaatggctacaagccaccatatgtaggtctacatagcatccccaccctaacctccagtgggtagaaaccaatctcagctatgttcctgacagaatttatcaactgtcttcagaatttgggtaaggaacttctcaaacctattttaatcattttctaacacgtaactgtggacaatatcatgactcctattccctcttcctcccccaccatcatcagttcaggtttcatcttctctctagagtatttgctctatattctccaggagacaaagaggttgttagaacccttggacctatagggactaaggttcagttggaacctaacctcttctatctaaattattgcataaatatttgccctttttcttccagctcaggaaagagactaggatcactcagtggtagcctctgaaatgcaaggtactttattaacctctgaaactgtaagcaagccccaattaaatgatttttttatgagttgccttggtcatggtgtctcttcagagcaatagaacactgacaaagatataagctgataccagagagtggggtattgctgtgacaggcctgactatgctaattgtttgagcactatggaagactttggggctctggactagaaaaacagttgaatgctttaatcaggacttaatgggccatattagtaggtgcatggaaaacactgcctagggtgatttgaactgtgaggatccagcccaggaagtttcagaagggaagaatctccctccatagctaaggaaagtcactgaggccaggtgtgtgtcagaggtaaccctacatggaggacatgaagctgtgagtataaaacctggaatgccttggagaccacaagatgttggaggtgccagagcctgggatacctgcaagaagagctgcagactagtgtggaaccagcccaagtgagacaagtgtgtggccgtcaacagagctgaaaggagttggagatctgaggggcactttgacatcagatatggaggcacggaatttggaatccaccctgctggttttcattcttgttttgctccagtatttcctcacggtgcttcctttcctcccttttgggatgcttgtgtgtgttctgtgccgttgtattttgaaactatgtgatttgctttttgacttttgactttacagagggttaccgttaagagattgtcctaagtctcagaagagacttggaaccttggacttttaaacagtgttgagaatgtgatagactatggggacatttgaagttgggctaaatgcattttgcattataatgtggccgtaagtctgtgggggccagagagtggaatgtggggtggtttgactaagaatggtccccataggttcatttacttgaatacttacttatcagggagtggtactacttgagaaggattaggaggtgtggccttgttggaggaagtgtgtcactgaggggtgggctttaaggtttcaaaagtcaagccaggctcagtggctttctcttcctgctgcctgcggatcaagacatagaactctcagcttcttcttcagcaccatgtctgtttatatgccaccatcctccccatcacgatgataatggattaaacctttcaaactgtaagccagccccagtttaatactttctctgacaatagttgccatggtcatgatgtctcttcacagcaatagaacactaactatgacatccaagttgtcggctccttgcaggtgtctttgtgtagcatcatggcaaaagctcagcaatcagatacacaattatgatagtgtcgtatgcagaacattccagaacagggcatccccaaaagactactcacatagggtttcttctggtcaaatgttgacgaaggagaccagaactgaccatccttcacaccatcttctaagcagcacccacccccacccccaccccccgacaatgaacccagaaggtatttttacacatgggtgcacaggtctatgtgaaacaatgctcagtgtagtattagttaaagtagaaagtgggaaattaccatttagtgagactctggttaaatacatggtatattcccaagcagtggcaaacttgtaaagaaagcaaagactaatatgctatgtggaatacattgttgactgtgaagaacaaagtccagaacaatatatagtgtgttacatgcctatgtaggcatggcaaagtcataaatggaaatacaaaatcaatgacttccccctagaggagggactaagaatcttaaattgaggagactttttagtgaatatttttgtattgtttgatttttaaaaaatacttatgaattaatgttttgctaatccctttgtaaatatttatcctgttttaattgtgtgtgtgtgtgtgtgtgtgtgtgtgtgtgtgtgtgtgtgtgtgtgtgtgtgtctgtgtgtctgtgtgtgtctgtgtgtgtgtttgtgtgctaggatatctgcaagtacctgcagaggcttaccaatttgtcctgactggctggccaatgagattcaaggatacatctctcttactatctcccatctcctatctcccataccccatatgccctctccccatcacatcagtgggattatacatgtgcactgacatgcccagctttttaagtggctggtggggatccaaacccaggtttccatgcatttgtggtaggtacttttccaactgagctatctccccagcagatggattcaaacaagagctacagtgtatcaccatctctgtcccaaaccctgctcctaggcaccagactatgactcatactcgaggtctgccccagcccgcggggctctagtaatttgtgggtccgaggtggatcaagcctgaaaataatgggcggaaaagaaaagcgagaccaagcgatttttgtcttgtcaaggtctgagtttattgaaaccaaggggctttttaaagaaaaagggggaagcagagaaaaaggaggtgggggaggaatgaatgttaattgctctcaggcaagtatccagaatctcctgtgtttatctcaagcactaactaagaaagtgggggaaggaataggtgttagttgcttctcaggccaggttccggaacctgaggggtgggatgctagactagctggcggctagctaggcatggggggtcgccaaggctggcttctgacagaggtctaaactactgactgttcattaattagttgtatgtgttattgtctttgtgaggcattactacaagagctcagcaatcagacatacaatatggtggtgatacacacagcacactctgcaacccagccttccaaaaagctttagagtttcttctgctcccaagagctacacagcccatgacacttgaaaagtcagaagaaaccagtgatagtgttggtaagatggcttggtgggtttaagtccttgctgcacagcctggagacctgagtttcatgcccagaactcatgaaaatgtcaaaagagagaaccaattctgcaaagttgtcctctgacctccacatgcatgccatgcaaccccaatacacactactattatttcttactattattgtagaagaaagaaatcagtggtagtatattcagtgttcacctagactgttcttactccatcatttttaagatttattttatattattgtatgagcattttgcccgcatgtatgtgtgtacaccacatgcatatagtacctgtggaggtccaaagagagcactggattatccagagaaggaattacaggttgttgtgagccatctgataagggtgctgggaactgaacctgagccttctggaagagcaaatgctcttgaacactgagccttctctcaatcatttcttactgtctctgttcaccaagctccttgactcaactcccaatatctgcctcaaggccacagactctttttgtttatttgtttgttttgggggtgttgttcattttttattaattttttacattccaatcccagttccccctccttcctttcctcccaaaccctccacccgccctcctcccatctgttccatggagagggtaaggcatccactaggaagtctactaagtctgaagaccacaggctccttttaaatatattcctcccttggcactttctttacaacatgctctgtctgtgcttctatctaaggggaagccagcctgctaggcaagttcaggaaagagggatcaggcaaagcccaagcaaacccaagcccaggacttggctgtcctttatgaggctaaatagacccaggtttctgactctctgctatctatatgtgaacaagactgacagctagccagaaagtcagcctcacctccagcagaatgtaaacaatgaatgaatgaatgttaatcaatgacccacacatgctgagtatagagaagttcatcagtttaatggaggcaaagggtcgacgctgcctctgtgcaagagcaaagtttcatgccaaactcccatgataagtgcaggatgagactcttgaagaacaagactccaagcccagtgtggtggtgtgtgcctttaattccagcagaggcagggaaaaaaaagaactaaattctgagttgagccccttgttggagcttctgagtaagtcctctcttagctcatacttgctgctttcctgagctcatctagcccctcaggcctgcccccgccaccctgcattgctaaaggagctagcctgaagacggatagcatggcgtgtggtacccaattgcttcatcttcagcaatcaattatttcagccctccctccaaggtgtatcatggggagaacttctcagcactcaacttgggtaccacggtatccaagagtatcacagagaacacccctcagaactctgagtttctagtgatgggaatttgtaaaccagccatcacactgtgggcaatactgatcttaagcacctgttagcgggatggtgcatgctctgggattcttctgtccagagacctgcgtgaattgcaccatctactctcagttcttcccactattccttgtgaacaaccggccagagataaagatgtggatgaccaggggttccccaagtttgagtgaagagctgccagctagctcatagccagatagcacagcctcaaagaggaactgtgtttcctcttccttggagtcgccatctctcattgtgagcaggggacgggtctagaatgcaagcatcccatatcaatgtgtcagagtaggggataacaacttagagaaccataagaaaggaatcttcctctaccccacatttctacagcaccgtatggattacagcatctcagagtgtagccagaacaacctctctacctgttcttgtctggtctgtaaacttgggagatttttaacaaccttgatcttatggtggctgttaaaaattgtttggtggccatatatagtggtacatgcctctgtgatcccagaatttgggaagtataggaagggaagtcaaaagtttaaggtcatccttggctactatgtcagatcttgtctaattttaaaaaataaaaataaaaagacaaaataagatataaaccatgaataaacttctacatcctctcagcctaggagctgttccagactcagatgacatcatcatcatctgctgtgttcccttcaaaagtcaaggctgatgtgtaacccaggatgagaacacttgcagcgactaggaataaacatcaaagttctctagctctctgcggctcagtctggcagggtttctggctttaaggtattgctgtccaacctgcaaagaaaggggagacacttcaaaccttcactctggactatccttaaaataatcttctagggtgtggtctaccatccccacatttcagactaataaaacaatatcagagtggtatatataacccattccttgaggccagtgattagtgtgggtgaaagtgggacttggatccattcttcccctcagtcccggtgctttttttaactactccatgcttcttcgtggcccccagcttgccttggcccatacagtctactctgcaactctggactgtcaagttggcttaatggttagactgccacttgccatccccataggcaaccacacagcctcttccttttgactaacaacaatttctattagacctgggtgttttgtttctgaggctagtacttagggtgttctctgtgccttcatttctctggatataaagcatgaaggcaggactataactcagtggtagagtacttgtttatcatacccaaggccttgggttctatccttagcactgaaaagaacaaatgaaggttatggttacactatgcctaccttacaacattctgtgaagattaaatgaggtagtttatgcacaggcactggcaatttgccttatagcttaggaaaaaccctaataaatgttatgtctctcttcccttcttcctgtagacctaatgggcatcagttagctaccagactcagtgtcacttttgaacaatgtcttccacagaagtctgagaacacccacattctggaattgttcccaatgacttactaattttaggaaataatttggaatcatttattttccattctctgatcctctttgtataccccacatacatccatcaacattaacacatagccagggaactagcttggagacagccctagtttagaacccaagcctcccagcctttgaacatatgatatgaccttgagttagacctttggtcttctgggacctcagtgtctttcagcaggacccctaaaatcccagcatccctgggactgtatggatgaccttgttataagtgtatcttcttgactgagtcctgggagtccacagaccttaaacccactggaaagagatttccagaatcttacctcttcatacacagtgaaatttgaggatgggttccggttcctcttcttggatccagactgaaaaaatgagggttaagaaggtgtaagtttaacataagagatgtcttgctcctgactcacatgcaagatcccaaagagaaagcccttcagccatgattcaatgtgtggttcttaatggtacccagagaagtacaatacatcctggcctatgatgtgttctcataagctaaagtcagaatttagtatctgtacccacacagccccccaatccacaaccacacaatcctagtgtccacaaataggacaatcctaatataaataccacctgaacccatgcatcatgtcagtacaccctcctctaacataaacagctctgggacatacatgtgtgctaaccttagcacataccaaaaacacagtggttttgtgaatcattagttatattttcagttgtatgtagaactttttattattgtgtgtatgatgtatgtatggcttgtgtgcagcagtgtgcatggacaggccagaggacaaccttttaggaatcagatctctctttccaccatgggttctggagctcaaactcaggtcattaggcttgtacagcaggtgctcttacatacttggccaatctcttcagtcccaagatttttataatataacaccaaacagtgtcacagtacctgagagcatttacatgtgcttatattacagcatgtggttaaaaaataaacatgtctcacagtggaatccaagtggatgactgattggtttggaagaaaatgaatgaaattagcaaacttgtcctaaacccctttaaaccacagcccctaacctgcacagacctccagtttggtggaattctaactctccattctgctgagttatagcttgtagctctactctgtgattccagccatgagagcgccattcttcctattcccttccataactgttaaatggctaagcatgagccccaggacacacaactctgtgtttccagacatgttgagagctgagattggagttggccttgagtgggtaatgatggctgtttcagtccagcagggctgcctagaacctttagtctttgaatgttaatattcctagttgatgccttcagctataggcagcaagcctctaccttggaaacccctccagtagctctcaccataacctcagttatcctaggagcgatcctgagatccttccgtcctgacttctgtccctgccctttatccaccacaaaaagtctaagaagatcctacaatccactgttctctgcatctcagaactgcttttttttttcacaggcagaactggaaaggcatttctccttattaggctcttagcatttagatataatcatttaacagaagctactcagttgcacagaatggaagacagctcactggggtatacacacatgctctgcaaacacacacctgcaaacacagtatagtacacacgtgcaagacatacatctgttcaacaaaactctccagaggaatagattcttaccttcctggaaggctggattactgaataaagtgtgcacgtttcttgtggtgtggaatcagaaggctaataagggaaaataaaaagtattccataaacaaagatccagcataaccctttgcctcaactctgactaaatgtaagctctgtgtcaatgagaagaagcctggagttagctggagggtagggcctgacactaattagttccattgtttctgttagtaacaattatcactatttgttgtgcacttattttatctatattctttctttcctaaccctatgttattcctaaaaagataggaatatttttctgccacacacaaggttacagattcacaaggaggaggggaagagaaagaataaggaagaggaggaggaaggaaggaaggaagagaaggaagaagaagagaagaaggagaagacgatcccagtacacaatagatgtgcagaattcaagtccaaaattttccaagatttccttaacagggagttcaatggctcccattggtaaaacctccttctctagaccggaaatgcatgttcatcagggcagacaactatctcctcagtaagataagccagaggagcaatctcattctcactcagtatcctgagttcttccttgggtttattaaaattgttctctgtcaagcccagtgcggctaaaaccagtgagccgacagataccagtcactcttgggatagatttctttgtgatacaactttgtcaatcaccagcgggtactgctgttcctggacatggtcctcagaaagtaaatgggagagaagaggagaggagaagagaagataggaagagaaggttttaattggaaacttttcacagctgtccatcaccaagcattttcccttggaagagaacacctgaccctggttatcaatgaagtcctatcatctgtcaatattagagaataacttagtaattcatgcatgaactttcaagttgtctgaagttagaggcattccaggaagaggtaggatggaaattgagaaactggctcaactgtatcactactcagctgtgtgaccttgaacacattagttaacctgagtcttggtttcctcatctgtaaactttctaaggctgtcaagtaaaatttattaagaaaatggtcattattgttaagtctaaataagatttagtaagactaatacacatctattctttccttaataaagataatgattaatggtaccattagaataattattacaaggactccggttcttagaatcagaggaaaaatataagatgaatcctgtaacggagtttgttctcctgaagacaacctagtctacacttctgctagctgtgaatgaaaatcactgccaaatatacccaaaagaagcacattcatacaacaaggacatctgttcaactatgttcatagcagcactatttgtaatagccagaaactggaagcagcccagatgcccctcaaccgaagaatggatagagaaaatgtggtacatttacacaatggagtactactcagcaggaaaaaaaaacaatggaatctcaaaattttcaggaaaatggatggaactagaagaaaccattctgagtgaggtaacccaatcacaaaaagacaaacatgatatgtactcactcatatgtggattttagacatagagtaaggattaccagcctacaatccacactgccagagaaactagtaaacaagaaggaccctaaaagagacaaatattgtcccctggagaagggggaaaggtcaccatcccctgagcaaattgagaacatgggaagagaggggagggagctatgagagtgagaagggaagaagaggaaggatgcagaggtcatgagggagcagaaagtttgagtcaggtgtagattagaagaaaggatataagataggtagggtttagttgggggggctagtaagggaggaagggagggagaagagaactgggattgtcatgtaaaacaatcttgtctctaattcaaataaaaaaatgaaaaaaatcactgccaagacactctgaacatgttcatcatttcaaacactgtgttagagcacctgtggctgtcttccggtccctaaggaacaccaatgtcccattctcccttcaacggtgtgctttaagtgaggcttgggaattcccatatactggaatgggatggattagagaggccagaggggtaccttgtactggaccattgagtagatggtgcctccatctccagagggtttctgctccggcatctgctcctgtacagaagagtgatgggacatgtactggtctctgtctgggtttaaattaagcagtgagaaacatcacaaagaagtggtttctaggaggagtgaggtacaaactgggaaagtcttatcatcaaacatcagaataggagagatgggaagaagaatgacttggagcagaccagcagcaaggagccacccaggagtcaacaacctgacaggtttcctgtctctttctttccctttaataacgtaaaactcccttcttgactttgctggcttttttgccaacacaaccaatgacagtgggtagagtgctagggtcttcaagacattgaaattcagagggcccgcccaaacattttaacaatgtgactgtcttaaggctcctctctagatccaggcttcatggtcagcttacccagggcctcaatccaaccccagagaagtaacaatgcagagtgaaagcccggtctcagagagcacatagcccatccttccttctttccctcccctcatggctgctccacaggcaattacagatggaggtatcccatcctacatgtctccaagaacacagtgccaagtggggctttcatggggtcagcaaggctacgagagttcagtagctgagctctccagaagtaagaggttgagaaacagaaaaacatcagccattctcagcagtagaaagtcaacaggagtttgttgcttttctcttctgtccacacccatgtgactggtctccagaaaggttgaatctgtgacctaaggggaagccacatgaaatttgggatggaggctttcaaaccaaaacccggagacagtgaaaagacaccaggccggggtgaggtcaggcaaggaggaacctcatgtcaaaagatggtcaacagcaacagcctgagtccccaagaggcatttcttcctaccgcccccttattttactagtctaacatcatcttcatctggagtaatgaggagggtaattttttataaacatttgggcatcttgtggctacaggtagatacacgtgtcctaagacataatagcagtggggaaatcaatcttctttagtttccagtccagcatcccactgctagcacgaggaagaaggcaaacagagcttctctcagaccagaaagaagctgttctgtgacagaagagaagagcccacgtgtctccctccgcctagcagtagacatggagtgagaggaaagtccttcccctccacttccactgccaccaaccccacctgactcatctgcaccttccccctaagccgtcaccacatcctgaaatacagtactgagagcacatgcaggccctctgaagtttccttctcctctacgttcctacccaactagatcttctgatctaggtcctgaagagagctgggaagagacaggtcttcacagtcgagccttcaggtttgcctactctgtaccaaaccaattgccttctctgctactttagccatgcttgggcttctacgcaacaggctttgaacacagactactgaggaacctccaaaactcttacactctggctgctcatgctccccagcccgggcagggattaagaggcccacaagagagaactcctatcttctaatctccatgagaggaccaggcaataaacagaaggaggttgctcttatcctggcattgagcccagctggtaatactgagctgaaatgaggatgacatcagagggcagtctgggaaggcagtagtcgacacattctgccctctgccattgatgtctgctgagttcaatcccttctgagcagatacagttcagcaaaatgatgccccttctgcctcgttttcattttctctgctgcatttctttccccctttttctctttgggcagagccaggaaacaggtagagagaaaagaaagatagaagagggctgaagatcacctcgaaatgacacctgttcggttccctttgtccccttccattttcctggacagatgaaggagatcctgaggccccagaatgtcctacttgattcctcctgccttgtggggccttgacatattcatatattgttgaaaattccttagggctggactctgtgtgaagaaaatataaagtctagaatttcagaaacaccaggaaagtttgctgtccaggcttctactttacaagtcacacctctactgaggatagtaaagatcttaagagtggctgcagaaaacaggcaggttaccttgccaggatacctaaagagcacagtagagcctttacccctcccttgacaaccatcttccaccaaactgggaagtcaccaaccaaagccagcaccttagataaaccagtacattggggcattggggaccatgctataaatatggtccacagctagtgtgaataggaggctacagttgttagctgccctccccgacccatattcacaaatatcccaacacctctgccaggaaaggagaagctgtgtagagtgtttcccatggacacaggctcaacccactggacctgatgtctcacgcaacagcactccatcaggggtctcctacttacgtgactttctcttcttatcccacacgcagaagcaagtgatggcaccgagaagtaatatgactagaataacgatgatcaccacaaagggcagaaaactgaactctgagggacacagaaggaaggaagactgagccctcacgtcctcatacgttagcttcaagaactatccccaaacccactgtcctttctcatgtggccaggctcctcacatcccataaattcattaccctattgtccctcctcagttgggtgacagactgatccagaggacctgtgctactgtcttacctctctgaggcaattttcttacctcaaaaacaaaaaaaggagataacgttttctccttctaggggctaattgcatgatctggtacctgtaaaacatcttgcaaagcaactgttacatctatctactgtttttaagtcagcaaatactcaccacacacctactgctataagctttccatttctccctcctggtttttctgccctcactgcccttcctcatcaaaacttctatatttgtgtttcacgtggaccctgttatataatacagccaacaagaagagaacggtaaagaattctgcattacaggtatccactaatgagtttttcacaagcatctcacttgatcatgaaggcacctcttatcatcatgcccatttacccaactgaaaaatggaaactaacagaagttaatcagtatctgcttgagatcacataaaaaaaaatgatgaagcaatgatggtctaggcgcccacaccagtgttcctgttactacacttggcctcactcttttttgttccttttcaacctgtgaatcatttagtcttgttgccccattttgctgtaaatttccttttcttttcttttttttcttttcctttttttaaaggaaaaaaatcttatataacagggtgagaccagttctggctaaggcacaaaggggagctggctgcaaacagattctttacattttatatgggttctaactataacatggcatttttactcaggttttcctctgtaaatctcttttagggtcccagaaactttgagcagttaagcatgttttacagagacagaaactgcaagtttggttgcttggggacatttatgatgaaaagatatttttagttatctcaagatgggccagagctgcttttccggggcagctgttaaccacggtcaccttggctgcctggcagaactgtgcttttcctgattgaaggcagagggtttaaggagaagctgtcagctggggccatctcccctaaacctctcagcagaagcaggctccttttgatatggaaagagagatgaatgggcagctgtaagcgaccagtgtcatatctgtctaacactctcttctgcctaacaatattttttaaagatttatttagttattatacatacaatgttctgcctgcctgtatggctgcagaccagaagagggcaccaggtctgccatcatgtggttgctgggaattgaactcagaaccgatggaagagctcttagccattgacccatctctccagcctgcctaacaatatttttaagcaaacttactggtggagagattctttataatgctagtttatgactccattttctctttcagtatctatgttttgagttagtctggttcaagtctgtagttccacggagggatgcctagctctgggttcctactggagtggctccctatttcctcaatagtgagtttctggaagctaagaattgggcattttgctagggctgcttgccaaggatttgggaactctgcactcacttgggatcgcccactgaagtaaggaagctctgagattggccactggatagagtactgccacaggacactgtcatggtggggctatacttccttggcagctccacccatgacaatgccagtcagtggtccttttgcctaacatgaatggcagtatacctaaatcctgaatgtggggcatggaatacttcaggtctagtcctgtgggaatccaaggggtactctgagaaaaggttctgagaacctattccttctgttctttcggtgttttcctcctctgtgaaaagagatgtgcctaacccgaagataagaaaatacactacatgaacctaaatttaacactgtggaaacccaagcccaaagtagagagctgtacataatttctgctgcaaatttaagaagaaagactctctgagagttgggttggttgggtcatgttggggtggggtgggttgtgtagggttgggttggttgcattggttaggttgggttaggttggatgggttgggttagtttgggtggtttgagttgggttgggttgggtaggggttgggttgagtgggttgagttgagtttaaactgggttggtttgcctggtgcccatgctgacatcacattaaacctttatctaacaaaaggtaatacaaccttaactcaggtaacccaggataagcaataaatgcagaactctactaggttccttgtcattttcctgctgtccccactgacaaagttactatgataagtgctattacctcccagaaaactctccagcatgaggtaagacatcactcaggagaaattgggtctccaacctctcaaattaggaagctaatgttcataacatcacaaaagtcactaaacaacttggtattccctatgaggagggaaaactatgctactgtttccagtagaagcgaaagatataaatcctcccaggctaagacagacctgtgtttctgagaagcccagtgcctgctgaggaagggcccaaggcactgcaccagaagaccatgtgacctgatactgggtctcatgtgagtctggttgtggagtccctgctgtgagccaaagtgaccccacttactttgaggggcactctgacagccctgagtgatgtttagggtgtcactttcccagctgactttgttgctaacattgcaggtatatgtgagcaggcttctggcttcagtcttgttcaccaggtgggtaaagttccttatttctgagatcagcttgctccctctgtacaaagaatagctcacattttcatccctgggcaccaagcagtacagagacagttgacacatcccttcagcccaggccttccactggccccgcaggtgaggcttctcaacacgatctggaagcagagattctggtcagagggttctggaaatacaagtcctacaagaatcagttgagtttaaactgagtttaaactggggcaaagtgagcagtgctaaaaactcaccaaatacaagaatctggaatttcttactgcaaacttttccactatgattggtgatctccagctcatattgaccactgtcttgcagtttagctgacttgatgccaagagcaaaatccacgtcattaaaatcatatgtcttattgaaaccattagaaatcttggatattttttttttattatgattataccgaaccaggagctcgatcttcttattgtttccaggtgagcctagttgtgtcttcttccattcaacataaaggatttttgtctgtatgttggaaggccgcagccagagaggatttcctgagatgccagccacatcttcagaagaatctgagcagcctaggaaagaaaacctggtctgaaggtcactgaacaagtatgagacctgagcaatgtgggcagttgcctgtaacttccttaaggatctgggagcaaatgtgaggagctcagagcccaatctgtttctctgcctcctagttgggagaaactcacagaccaacaataacagctaaaatctcttttgaagattcattttgttttttaaaatatgtatgtacacgtgtgtttgtgcacgtgaggacagtgcccaggaggccagaagagggcattggatccctcagagctggtgtttacagacagttgtgtgctgtcctacatgaatgctaggcacggaactcaggtcctccagaagagcggcattcaactgctaagccaactctccagccccacactagaatctcttgagtattgtgcaactgacaagtctcaaatgtgttgcaagtacttaacttctcaggaaacctgtgaaggttttatctcatttttataggtaaagaattaagttagaaaatacttaagctgggtgtattgacacacacgcctttaaccccagcactcaggaggcagaggctgatagatctctgaattcgaggccagcctggtctacaaagaattccaggacagccagggctgttacacagagaaaatctgtcttgaaaaactaaactgaactaaaaaaaaaacttaagtaaataaccccagccacacagaaaggtgatgatcttaaaagccgattgatttggctttactgagagatttttggttcagttttttttaaatataatttattatggagtctatgtgagtatgtgtgtacgggtgtgtgcacttgcgaatgtggaggagtcgttatcattctccacattatttgtgtgtgtgtgtgtgtgagagagagagagagagagagagaaagagagagagagagagagagagagagagagagagagagagatttgtgtgtgtgagagagagattgtgtgagagagagattgtgtttgtgtgtgagagagagagacagagagacagagagagagattgtgtgtgtgtgaaagagagagagattgtgtgtgagagagagagacagaggcagagagagagagagattgtgtgtgtgagagagagagagatgaggcaggtagcacactcaggctgtagcacacatatggaagccagaggataacttcctgaaactggttctcttcttccatcttttgaggcagggtttctcttgtcctttctcgcactctatgtactccaggctagctagcctgtgagcttctgggctagcctgtgagcttccgggcgaatctcctgtctctgcctcacattttaccttagtagtgctaggattacaaatgctagctaccacacttggttttttatgtgttccagggatcaaactcaggttgttacagttgtgcagcaagtgcttttacctactcagtcttcctcctggccttagttttggaaacagggtctctcactgaacctgaaactcactggtaaggctaggctggctattttaaatgggtgttggggatttgaactcaggtcttcttgctttccaagcaagagctattaccctctgagccatctccccaaactcttgtttttagttgtcactgatgtaagtcactccattacaatttgcctatcaagtcccctcactcccaaaaaaagttcacatgctgtaggattggtcctcagcgagtgacatcatcgagaggtggctggatggtagggcactaacttcatcaaccaactacacaaaggtggagctcggttagctagtcactaaagacacatcttcaagggctggagagatggctcagaggttaagagcaccgactgttcttccagaggtcctgagttcaattcccagcaaccacatggtggctcacaaccatccgttatgagacctggtgccctcttctggtgtgcagatatacatggaagcagaatgttgtatacataagaaataaataaaatcttaaaaaaaaaaagacacatcttcaaaagcaacatcttccctgatggggaaatacttctgtgtatgtttatcttattgattgttaaataaaatactgtttggccaatgaaacggcaagttaggcaggactaggagtcaaagaggattctgggaaatgtagtagagaagtgttgatccaggcagaaagtgacatagcaaggaaactcatatttaagcgaaggagaaaaaggaagggccctcttttcccctccgctcctgctccagtggcaagatgtgatccaccggccaggagggacgccaataaggtgtccgataagataagtcttataaaatatatagatgtatgataattgagactgagctaacagatgagaatcctagtcattggccaagcagttttgaacctaatacaagactgtgtatttatttgggcctaactcaagtaggcgactggcgtaaagttcacacgtggcggtggggctcaggcggcttttggcagaaagatttatcgtaacacttccccattgtctctctctgctaaaggttagccccttcccaccgtcatgttcagcctcatcatagtcccccagcaatggagcaagtcagccatgagctaaataaagcctctgacacaagcttggcgctatatctccattggtacagtgcttacctagcttgcatgaggccctggaatcaatcctcagcactgtttaaaaccaggaatggtggcatacaaccattctctcacctctcgtgagctagaggcaaaaggatcagaaatataagatctcccccagctacgtgacaaatcagaggccagcctgggctacatgagacctcatctcagaagacaagaggaaatcaaaactctgaaatgagccaaatataaatttttccccattttaaatttgttcccccaggtatttatcacagggacaaaacatctgactcccaacacactgaggcaagcagtggccaacagtgactgccagaaaccctgaacagccagacccagtaaaactgatgctgagttctagcccttcttgtgtcccacaatagagctggactcacagtccactcaatgggaacattgcactgtggacagcatacattaatgtttgccgttgttttagtgaccagatgacgtctgccagagttctctctaaaattttgggttttttttttttttttttttttttttggtttttcaagacagagtttctctgtgtagctttggagcctatcctggcactcgctctggagaccaggctggcctcgaactcacagagatccacctgcctctgcctccccagtgctgggattaaaggtgtgcgccaccaacacccggcatctctcaaaatttttaagctctgcctcccaggtacatgtctgcacggacctctcttgggatcaagatgtgacctagttaatgtagttgcggaagactataaaatcgtggtactttattaagtatctacctcagagcagtccagagcagtgaaggaagccatttggtaaggaagctatgtggtatcacccatcagctgtaggcaacaaaagtgacagtcaaaagagagagcaatgggggtgaagggggtcagagaataaaataagagagagaggtggttatacaaatggttcttaatgtagcacattgggagaaaagtatgttagagggagacaagattttagctaactaagatcttccagtatcttctccctgtgatgatatattatttatgatttattaaagcttgcctgaggattcagaactcaaagtcagccacaagccatagaagccaggaacacacctttaatcacagcaaccagaaagtaggaggtggtggcacacacctttaatcctaggactcaggattaagagatagacgggtctctgtgaatccagggccacccagatctacacagattgaatcaatctataagagaattatagtgcacacctttaatcccagcactacagggtataaaacacaggagcaaggagtcagtagaaggcattcattctccagccacactgaagagagctcatggatcagccctttcaggctgaggtagaggtaagaattagtggctggctgctttgcttttctgacctttagcttgaagtttgaacccccatatcagtctctgggtcttttatttactcatgttacatctccccacaccaaattaccttgataaaacctaagaaaatccagtgagagaccacagtgcccaattataaggaaatacaaagacaggaaggaatagttgttcatgtcacatgcacacacttcaactccaaccagtccagttggagtggtgtctccaacttgggagtgtgaatggttaagttaggccttaggcctgaaaccttgtaccaggcctgacacagtgaaacttacgtgctacagagccccacaacccttaccaccaagtcaatatccacaatctgagttaccagaaccacattaggctaagctgagtgttcctctcctcttgcaacattaggtagcagggcaggaaataagactccagttgttgggggagggggtaggcttgtcttatcactcactgacagacttagtagaaactgcacatgccagacaaagtacatacacacaagccctgcatcagataaagacctaggcaccaatggactagatgagtctctcagcatacatcaccctggtgtggactgtgtggtgaccattgctgcttgacaaagcattttgattttatggatcacaattctccagcaccctttgttattttttcatttttaatggttctcactctgtgttatgggagttctgttacaccttttcctttgggaaattttgtgtgggctttgaaggctgaaaatgtataaaatggcagcctctttaaacaaaacaattctttggaagaaaatccctattaccatggaaccatatagcttgataccgctgcctaccccatacaagttaacacaaagctgctagagaatttaggtaatatatacttgataaatacggtatatctgataatcaagatttataaatttctaagatctactcgggttcacagtaacgtttgtcgcagtaattactattcacagtaatattctatactggagcatctgattccctgagaaagtccttttcccaaggtcagacatttagacaaaaaccctattctctcaggggcttgaagaaagttcctgcctgctaaaaagggacattcttatctctggcaagaggaacttgtggctcttccgtgaacacacgactggtgcctattaacttgtcaaggtcaatgctagcttcctcaacccctgatcacaagccacaccccagttcacaggtcccctttcccccatttaatcctttgtgtggttataaaaggtgtaatcttctttcaataaatgggcagccatcccgattcacccccagatcctgtcagtctccttcccctcaccgactccatacctcctctttgggacctgaaccccactggagctggactgtggctggcatgctcctcattcattcatgagaactcgggtccttgagcctgtgaaattcaagcatggcccagggtatcatgtgggggaccaaatatttatgctatggaatattttgagatccagccttgggtttcactaaacagtagcaccggaaagctctggcccactattgtattgctaatactagcaaatctactaatatttaccatagcctcagtataggatgcctcctagctttgcatctccatgggcctaagcatctgaataggcctgtacctgggcagagcggcaaggtgtgtgagtaactagggagaacaggagttaggggcgatcgagcagagaggagaacaaggacagaagtcatctcctcgtggtcatggcaggacagttaagaaacagccgaaaagatgaaagactctagttttacaacatggaactgagagctctctgaagatgacaagatgcctgtttttggtctttatcgccgctgggttgctaggagtatccaggtccacacacccccactcaggcagaacttcatgggttaaggctgagacatgccaggtaacgacagtaccatcaacgtaggttgtcacagactgccttcaccaacacaacctgacctgggggaaaggctttaccaaattctcaagggtccaaggccttggttcctgacacagccagttcaagtcaaatacacactcactcagatcttcactcactccctatatccagcactacatgaactgtgcatcccagcactctggagggagtggctggaggggcaggagttcaaggttacctttagttatataagaagtttgaagtcagcctaagacatatgagaccttgtctcaaaaaaaaagagagaaagagaaaggaaggaagagcaaaagaaggaaacttttttatctctaaggaattgcataaagctggaaatgaagggataggataaaaatttccatgaaaatggaatcaaagaaagagtagtcatacttctatcacaatacagactttaagtagctaccaaaaatatcctatgaataaatataactaaagggtaaaagatctccataatgaaatttataaaacataatagaagaagctaaaaggacaaaagaatagaaaaacatcccacgttcttgggtttgaagaatcattattgttaaaatggccctacttcctaaaataattaatatgagctatatcaaaatatcattgacattctccacagaattagaaaaaatattatatgactatatatgtgtcctgtttcccacagaggccagaagagggcattggatttcttttatgtgcccagcattgctctaggactgggcttctttacttcagtccctaatagtcaaggcccaagaattccttcttgggtgttgggaaggaacttgtgctgtgtatcatttagcaacaaccctggcctctgcccactagatgccaatggtaccctagcctcagtcatggaaagtataaatgtcttcagactgtccccattgagaaacactatgctgggcattggagtgtaatgtgagcaagagaggcaaggtcccttttcccacaaagcccacattccacttggggcaaacattttaaacaagcagaaaatttaaaaagatttctcagagaggcctaagtgaatgggggggaaacattttaatttaaaaggtggcaccagagtgtctagagaaatgtaggtgtttccttagattcctggtgagaaaagacctccctactggtctagcatgtgcctgactcaagattgaaagataaggcttatataatagttcatcatcaaaaacgtaatcaggacaggaacctggaggcagaagctattggactggccatgggtgggtgctgcctactggtttgctcctaatgacttgctcagcctgctttcatatagaaccaaggaccaccaactagggtggcaccacccacgataggttgggccctcctccattgatcactaattaagaaaatgtcctacagtttgcctacagcccgatcttatggaagcattttctcaattcaggttcccctctttctgaggactccagcttgtatcaagttgacataaaagtaacccttacaactgacaacttgtcaacttgacacacaagcatgtcactcctcagttagaatctttcctttctcatttatccccaagatggcatgttaacatcacaataaaaacctaataactttaaaagtcccacagtccttacaaagtcaaatacattcaaagtgcagtctcttaaaaacaaaaaatctctctaaaaatctaaaatctcttttaaaagtttagtcttcaggctgtgagctcccggaaaaaaaaataataataataagttaaatatgttcttcaagagtggagaaccaggacacagtcacaatttgaacaaaacaaaacaaaactccaacagtataaataactcaatgtccaattgtctgggattcactcactatcttctgggctcttccaaagggcttagtcacttctccagctccactctctgcagcacacacagcttgtcttctgggctccagggggcgccactccactgctgctgctgttctcggtggtcattccctggcacttccatccccaaaacggctagggtcttccgctgcaacggagctgcactttcaccaatagcctcgcatggactctcttcagagactccagccccaccacacagtgccaagcctcagctgctctccatgaccccttcatgtcttcaaaagccagtaccacctggtgactcccacactaccaagtttggctgccagcacaaggtacaaccttagatgcttccaccagtacaggtcaggatgctaaggtatgatgttggcataagaagagtgtgccttcctctgcgccagggtgttagaaatggctgctcagaggaggtggctgggagctgccattaggagaaaaccttgggtcagcctagtggatggagaagggagtaaggaagaggatgttacaggcaaagcagcagcctgagctgggctgccaacacgatgatctagtaaggattatagcaaaactttcttcaacatgtttggaaagtggagtggcaggcagaagtttaatttttaggcgtttcataaaactgtgagaggtagcacaaatatctaaagtcatttagtctaaaaatgtacggtacagtaaataatagcaataagtaaactactgtgtaaccaacagcagatcagagcagagacctactctgttctccactaccacacagttaaatgtggagcatagagaaaacggagtatacttaagtacactgttagttcctagaaatacattgggagacctatagtcgttattaactctacactgtactgcaggcaattactaaattataccactgcattttatttttatgtaatactgaatggatttaaatacctaatatggtttttgtctataaataaaagaagagctaagagggctagcaagatgactcagtggataaaggtaggtacatgctgccgagagttacaacctgagtttgatctcctggacagggcagaaggaaagaaccaactctcaaaagttgtcctctgacctccacttgagcaccatggcacaagacacacacacacacacacacacacacacacacacacacacacacacacacacacacaaataaatcattttaaaagattttttgaaagaggaactaggggctgaggatgtacctcagttagtagagtgtttgtcgagaagccttgggttggactcccagcaccacatagcatggccatggtggcacacattaataattccagtacttatgagggaaagttagaaggataaggaattcaaggtcaccctcagatacatagcaagtttgaggacagcctggagtaatgagaccctgtctaagaagagtgggaaagtcaggcagacccatagacgtccttacagttgtcagtttgggcttttcaagtgggacaaaacttggctaaggtttgaaagctagtgctggccagaaactggacaatgggagcgactacactttctccaggtgactgtctgcaggagcagatgaggtaggagatactgggatagagtccctaaccatgcttccattttctgaaagtacattttcagccatcagcagctatggtgctcaacagcaacattgaaaagatgctgaccgttcagaaccacctttggaaggatgaagacactgtagaccaaaaagaaacaagaattcccagagggaagtgggcacaagtccctctcttagctaagaagttattcacaattagtagctgcaaggggaaggaaaatcaggtttcttcaacaaagtgacactggatatatcaaccacactccagggtaggtcccatgctccagtagttgaccaacactctgtgtgtgtgcgtgtgtgtgtgtgtgtgtgtgtgtgtgtgtgtgtgtgtgtgtgtgtaatatgtgtgtgcagtgtgtgtgcaatgtgtgtgtgcagtgtgtgtgtgtgcaatgtgtgtgtgtgtgtgcagtgtgtgtgtatgcaatgtgtgtgtgtgcagtgtgtgtgtatgtgcagtgtgtgtgtgtagtgtgtgtgtgtgcagtgtgtgtgtgcagtgtgtgtgtgtgcagtgtgtgtgtgtgtgcaatgtgtgtgtgtgtgtgcagtgtgtgtgtatgcaatgtgtgtgtgtgcagtgtgtgtgtatgtgcagtgtgtgtgtgtagtgtgtgtgtgtgcagtgtgtgtgtgcaatgtgtgtgtgcagtgtgtgtgtgcagtgtgtgtgtgtgcaatgtgtgtgtgcagtgtgtgtgtgtgcagtgtgtgtgtgcaatgtgtgtgtgcagtgtgtgtgtgcagtgtgtgtgtgtgcaatgtgtgtgtgcagtgtgtgtgtgtgcagtgtgtgtgtgcaatgtgtgtgtgcagtgtgtgtgtgtgtgtgcaatgtgtgtgtgtgtgcagtgtgtgtgtatgcaatgtgtgtgtgtgcagtgtgtgtgtatgtgcagtgtgtgtgtgtagtgtgtgtgtgtgcagtgtgtgtgtgcaatgtgtgtgtgcagtgtgtgtgtgcagtgtgtgtgtgtgtgcaatgtgtgtgtgcagtgtgtgtgtgtgcagtgtgtgtgtgcaatgtgtgtgtgcagtgtgtgtgtgcagtgtgtgtgtgtgcaatgtgtgtgtgcagtgtgtgtgtgtgcagtgtgtgtgtgcaatgtgtgtgtgcagtgtgtgtgtgtgcaatgtgtgtgtgtgtgtgcagtgtgtgtgtgtgtgtgtgtgtgtgtgtgtcgttgttgttgtggttgttttcaagagagaaaactgtggagttgagtgggtaagtaggcaggtgagggcgaagctgggaggagttgggagggaaggaagaatgtgatgaaaatatattgtatggaattctcaaaggataaattaaaatgttttcaaaggagggaaaggaactcctaggactttaagcagagatcaaaggctgagtctacatctgttttttgctggattttcttctgcaagtctctgtagtttgctccactcttcggaatctttcacacatcctcacgggagcagggagccaaaatgagtgagcaggaccccaaggcttgtgagatagctctccaggaagtggttaagtgttacaactccactttattccgggaagaaagggaaatataaaggttggggacagtgacaggggcatcacttaatttgcattaagaggcattctcctaccaaaaggctcctagtaggcacagcaagggagccttccagcagggatttgccagggtttgagccaaagataagtcgggcatccaactttagagacaggcatctggtttagagacagctttcagataaagtcagtcctctaggcccagaacattctccagataagggcaggtagagagcaggaggccttgctggggagtaagggaaccccatattgccaaacttagagaaaaagctgctaggcttatggaagactgcgacctctaccaatcagcaatgtatccacacaggtctccaaagtgcagtgaagggaaaaaggcaactgagtaggtgtgtgcttcctagaggggtctgactgctggggtatgggtaggaacagtagaaagacaagaactgtgggagatgtaagaccttagtccccatccctgggagacacatatgtcagtgtgcgggggagaggagaaatgctaatatggaaagataatgagaaaggaaagaataactccacaagttactatatgctcagagtgagatgaagagtgtaaatgtgactgtcagttcagaagggagtggccacagccaattccggtggtcagaggctccacagccactgttggctgctgctgcttacagccttgggggctcttttccggtggttaagaacggaagaggtaaaatattaagtctggaggagaaggacaggggaaatttaatgaactctactgcagcctggggaaatgaggaacttgggtgcagcttggggaagtaagcagtgagcagaaagaatggtcaaggactctctctgactcagcaaggagtcacccacgatgacaccccacagggatcagtcagctcagctttctccaacctagacttactgttcacagcggactgggaagcctgagtcccagagaggggcccgggaaaagcctctgatggagggggtatattccctctagccagcaatcggatgttgaggttttctccgctggctttgtgttaccaggcttaggagagagacaacagatgaggtcaaatgctgaaagtgaacagagacttgtaacttcttggcagggccagcagaagccaagacaaaatgggtttcctgcagaggccacagcctacttctttctttgtctccactttctctacactaactgaccatagcctctcctcaggcaagctgattcttctcttttgtcaaaagtgacctagcctgtgtccctctcctaatcccagttcactgaagtgtctgtctttctccaagacaacttctatgttatgcttctccctcagactctgtgttgttgttgttgttgggttttttgttttgttttcttgtgtgttttattttattttatttgcttttgcttttatgtaggctatttcctgggacaggattggtccatgttatctagttttatgagcccttatcattccaggccagttcccttgtaacccccacctggaagaatcgatcatcttctcagatccctttaaatgtatcttgactcttagtaccagggcatcttctgtcttcccttgtagttagtattgtacacacctatttcctgtctgaaagatgctcaagggaaagctctgcattaaggatggagatatagtttaattagtagggtccttgcctccaatgaccaaagctctgtgtttcaggccaacctgggatacatgaaattctatctttaaaaaaaaaaaaatcagtttcaactgtttcctttcaaaattttgcttaattctcagaacataataaagccataatgaatctgtttaattaattcaagaatgcctttgtttagctcccaagagtggctctactatagagatgtcatgcaaaatggccaagaagttacagagacacaggccccttgactttggcattttgctttgtgggctccgcatcattgtagtttcatttcctgtttacaggccctcaaaaaaaaaaaaaaaaaaaaaagccagttgccttgaagcaacttgaaatgtcatgcactacatggctcaagcactcctgaaaacagttcaacagcacctgctatgaatatatgcatttaacccccatgacttgaccctagaaatgtactgttatgtgtttggaaaggttcatagcatttttataataccatttttaaaatccaaatgtttatccataacaaaatgaacaaattatgatataagcatgagatgaaagtgataagctccaggtagtaacaaagtcaagcctcataaaacgtcaaacaaaagaagccaggagcccgtaccagggaattccacttacatccaggcaaaatcaacctgtgagaatagaaattagaatgctgcttatatctatggaaaagactaagcaggtgatgattgggggtgaacatatgattgttctaaagctgtcccaaaagtaactcactgacatgcagatttctgtacagatgtcacagtttaataagaagggttgtttataaatacatcatctggctgcccttggagtgatttctagggtccctttggggtcctgagccaaaatctttcccacacccagttgcttccccactcatgccttgtttgagggctgtgatgagcagaagttggatgaaaatggctctggcctgctagagcctccctggggtcccttctagagcagtgacaactagtaccagtccctgagaagtgcaaggcccattacaaccatgtgctaactggggagacactgtcccagcctttcttttatctaccatacttcacccagacccaaacatccaggcactcacaattcccagcccatccttttcttcagaatggacaaccaaaaatctgaattcaggacccaaatgaactttaagggccaggtataccctccctgtttttatgtatatggctcaagttatcatcctagcccacatccaggattccagaacagaaaatgcgcttattcactccataaacatatctcgaacacctgctctatcgggcatggcactatgctgacagcatgtaggccccggacgcatatgtgccaagggtttattcaagcatggtcctcaatgtctagcacctggcttaatacagagctgctcaaaacagattcagggagcagatgggagcagagaggagggtgttgagtatggaaataaatatgtactgaaggtctacttgtgccagaggccattccggatgccgaggctacagtaacacagcaaaaaagatttaaaccttggtctctaggaccttacattccagtgggctgaagaagacactgtggggcagaaaacaatgtaggaaagcactgtgatatgtaaaatggagatgggaaattagagagtattatgtagagtggaaggtcaggaattgctggcactctcggtggggaaggcaacactgacaaggtggtgtctggccaaataggagaaaggagaaagcccgtgactggtgacgaagctgctcccagagagagaaaactggatgtgaagcaagagtgctcacatccctccagctttccacactttgcccagactaaaagccatgcacttcacaaaggccaacaggacctggatggactgactacctcctccaatctctcctcttgctccctgcattccagttgactatgtggatggcataatcagaggctccgagttctgatctcccagacacacacatgcacctgtgagtctatgccaggccccaccgcacaccaaccaggaatccttaccgtgaccctggtgacccctgacgagcaggaagaatgcaagcagggcagctttccccaacatccccacagaacagagcaggccaatgggccccctctcctcttcgggagctcagacgttaaaagactcagctgctcggtcagtaaaacatgagcagaactaccttcgtgcctgtccagccacaatttcctcaactcaaggctgttcacttctgctgtgagctgacaaggccactgagaaagcctgagtccctagactgggtctaaccgttcccacaagctaagctgccaccagtgggcgggtgctcagagtgcacagtgactcacaaaaccagctgcaaagccttagcccttggtctgcctcaagcctgtgcgctttagcctcaatcctacttgcagtgtggagagaaaccaacagccattatcccagactgccccaaaccaacacacactgcggaagcagaaatgggaaggaatttagactacctgggtggtctgagaagaagaaccctgagtaagtggttgaaggagaggaacgtgtagggtgacttaggaagagacataaagtttagagttgctgggaaatatctaaccagcctaggacatctgtgataccaaatggttagcatatgcaaattctgccctcctttcacctttccccagaaagaatgcaaacccaattgtgttgccctccccatccacagctggattccatcctgtagaataggcagcaaagatccctgtgaacttcatggagggacggagacagtggtacatcacctccctaaagacactttacttcaaggccataatgagagtgcatgcctttttcttcccattttcctcttagcaacaaatacttgtggttccttccaaatacatcctctttatctatcctaagatgtatttctagactgaccaaaactgagcaagatgacatccagatccttggaagcagcacagatgctctgaacaggacaaccaatttggagtcaaacatctggacttgaactccaactcatcaacttactacccgtgtgacgctgagcaaattactttctgagtcctgagatcaacagtgcttgggtgggagaaatggctcagtaggttaaggtacttgtcctcaagcctgatgacctgaatgtgatcccgaggatccacgtgatgaaagagaattggcctccacaagtacccaaaatgtaggtgagcacacccataaataaatgtgtgggttttcttaaagatcagcaatgcttgaatacttgagtgtcctttaggatagttttcagaatcaaattaaaagttatccctgagagtgtgtatgtaaaactctggtacacacatgtataaaaatgtgtaataagggagctggagagatggctcagcagttaagagcactggctgctcttccagaactgagttcaattccaagcaaacatgagatggctcatgaccatttttagtctggatctgatgaccttttctggaatcaaggcatacatgcagatagagctctcatatagagctctcatacacataaaataaataaatctttttaaatgccataataaacccattactttggttgttattattttaaataaatgtgaatgtttgtgtcccaccattctaattcaaatattgagacctaatcagtatgttggtattagaaagtggaatgttaggggaagtgatcaagagcgctcatgaatggaattaatgttcttatttaaaaagtgggtcaggggaccccacaggctccaagaatcctgcttatttcccattctttctaccacgagaggacaaaatgttaagagtctgcatgcccccacaaaagccttcccagaacctgactatgagggcatcctgatctttgagtgtccagctttcaaacctaaagagacaaatgtatgaactacccagtgtgtggtgtttcaatacccaagcacttcagtgagggtttgcttcttcaccatcagcctgctttgctttttcctggatataataattatccctgatcctcttaagacagccctcgacccctggagctccctcacggttatctgccagcatccctgactttgagtagtagtgttcaagatgtagtggtggctcaggcctttattcccagcacccaggaggcagaagcaggcagatctctgtgagtcgaggtctacagagtgaggtcctgaacagccagggttacacagtgaaaccctgtctcaaagtcaaaaacaaagtaatgcaacagagtgaatttcctcacataacagatggaaggcaaggtctgacttttggaagcaatgaacaacagtgaatttaaaagctgctttaccctggaagaggaggcaggacattgtcttgaatcagaggcctccttgggactcactgagtaacaggcaggcagggctatatcagcaagacattgtctcaagacaggaaaatcggcttcaccaatcctggccccagtacagccccatcctcttctccaaagccatagacgacctaccagcccctggagactgaactggaagaagtgccgtattcgtctttcttacgttcctaacaagttctaccacatagcgttgctatttttttatacacactgtcctgtcctgccctgagagcttcaagaaaaatgcaaccttagctaagtattcctagagcctgcatctttccaggtgggtaaagatgattcagtcctgaagggatgaatgaactccctaaagaaggctttcccatgatatgacaaactttaaaagattcccccacagaaggcctccccctccctggggagcagaaagggggtgagtgggagggggcgggagaggaggggagggagagggaactgagactgacatgtaaaagaagcttgtttctaatttaaataaaaaaaaaaatcaaagaaggaggaggaggaaaaggagaagatggaggagacggcttttccatccccagtgagatacaacggtaagctgttccaccttagtctctcccctcatgatggttagttatactttaccctgccacatcttgagcttctgtgtagtttagccactttattacaaagattcaaggccctgcaaaattcacataaactcagaggcttccccaggtctctggaagtctgggacagaggctcaaatcagggttttgaaaaccagccgccaacacgaggtcacaggttcctccagccccactgtcaccttcctcccccacattaagctttcactatttcgcagtgagtgagtggggtcggcctcggaaatcccacctcccaagacactttgcaaacttcggagccccaagaccaccttgaagtttgttaattcggtagaaaaactcaaagaatccattaaaagctactttcagctggttcgtgttgcaaataaaaatacagaccaaaatgaaacaagggaaagcaacatagagcaaggtctgggggaagctccaaagtgacgtaagcaaacagagcttacctctcaaaacatggttacagtaccttgcacatatgtacaaaattgtccccaaaacgatgttaacttcaaccaaatgccttttcagtaacagtatgatttaataccataattaaagttactgatttttaaagtcattaaacaatataaaataaatgacagaaattatttttttttacaaaaaatgacttaactctaaaaattgggtgtgacaatatatatggagtattgccaccaggaaagcttgtgagctgtgtctagactctgtacttggtcatatacatccaggctcatcacgcacacagctgaccttgctctctgaccgcttccgaggttgatctgatgctaagtggaccaagtcctccacagtaaatcactttgttggcacagactgtcatggtccaaggttgtgctaaatgaagacactcttagtcagccatattccaaggcttagaaatcacctcctaaaagcccaggggaaaggccaggcctttctttgagcaatgttaatccttttctgtacatctcaaaagaaaaagttattcaagcaattaaggatgagtctttcaaaggggaccctcctggttttaggggtgacttcagccagtttctaaagaattaaacacataattactgtgtcacaacactaagagaaaactaattgtctttatttctagaactatccatactgtctgtgttctgtcaggatagcacagtggcaggaggctcacaggaataagcagtcacaccactgaaaagaaagccggagaactactcaaaagtcaggtacattctggtaacagttcagaggtcccatgagaaggactgtttttccgttgctgttttcattttgtattgtttttttttttttgagacaaggttttattctatatattctggaattctttatgtagcccagctgatgtcaaacccacagtgatcctctgtgtcagcttcccaagtgctgggattacaggcgtaagccactatacccggtcaaagagatgtactttaatctgttctgtgtggagctcccccacataaccaaagcacctcccactaggcccttccttctattggccccatcacctctcagcacactggctccagaaatatgaatatatggggaacacatgcaaaccataccgaaacctcagcatcatgacgaagattttaacaagcagctggtgtcttttagtcgctatttctcaaaagggttacaaaagttcttctgcttctccgtgtgtgtggtgtgtgtgtgtgtgtgtgtgtgtgtgtgtgtgtgtgtgtgtgtgtgtgtgtgtgtgacgtgcgcatgatcatctcttggacttttcactcctcagaaaaaaaagaagactttgcctgccacatctttgcagggcttaggtcccaggaccctggctaggagcgataaggaaaagctgggactatgtgcactgtgccctctgctggaaaagcctcagcacccatgacgtgtggtgtgtttattttatggggctgaatagggaggtagagtttttgcatacagtggaccaatgatgttgggttattacatacagataaacaaagagatggggttattctatgcaggtgaacaaggagacaggttttgttaatctcaatagctgcagtctgtgggaaagcaatctgcaagctgtaaacataggggtgcggttgaaagctgcagcagaccatttctgcacactggcaacattcacactctgacctgggaaagactttgccatccctctgggcctcacctgaagaagactttgccagtcacatggtgttaagacattaggatccttgaccccgctttgcccatggcatggcaacaatgcacattcattcaggacatcactggatccctgcaaattggcccattattgtttatttcttgcttatggtgacttcaggttaaaggtgaagagtgcaagagtctcataagaaaggtctcataaggtctcttcaaacaatacctggggcatcaagtagcctggcacactgcacccgagcccataagggaagcacaaagtgcatttcacaacatggctcatcttagaattttaacacgggaaacttgctgctaccagcttcagtgaagaaatagccctggaaacgaagaactgaggctccatcccccacactagcaacaaggaggtaaaaatgagataaatggctatatgttagaatcacacaaaagatgagtgaaagacttgtgcctgatgtcaagaaaagcatatcaacaaagtgccttgttgaacttgaagataattaagaagctagagagatgtctcttcgggtaaagactcatgcctccaagcctggtgacctgagtttgattccaggaactcccaagttatcatctgaccttcacttggtatgtgacagtcacttgccttggtttgtatgtatacacacacacatacacacacaaaacaaaaatttaattttaaaacaaattaaagataaatataaatttgtcttatacatttgtacttgtgttatactttatggacttcaatttgatttagtaacaagttatattccgaagtttttacatactgaggtttggcatatttatataccaaaatattttcaaacacacacaaatataccacacacaatgacttctgcgtaccttattgcctaatttgtaaattatagctagtttgaaagttctaagtataacagaacacactgaaatttaaacgataaagtaaattatacaagcccactttgcctttagttctttccactgtgtctccccagaatccctaaaaacacatacatgtgaccagagttcagcagcagcagcagctaaaatccatcaaattaaatcattttaatagtggacattcacaattaccataaatgagatggattttacatgacatggctacattctaaaagagtctactctttcgtggttttgtttccatcttgtagaatccgggacagaagtgacagcttccctgattctgtatgttgctaagcatacacccacacaagattaagacactagctctgacttcctgccccactgagttcctccttttcttccccgttcttgcccgtctcccaccttcctccacttccatgagcatttctctattctccggctcatcttgtcattccagctgcctctgaccacagaccttagcatacctgtgagctttcttctttccaggcttgagcagccacagaccagaccgttgcctccccttgctccactctccgccagcgcttccttcctgccttccttccgaagggcagagtgacagcacatgcagctggagagttggacgcactgtgcaaaaaaagactggtgcacacaagacagaatgcatgcccttctcccagccaatgccctcaaagcattgcttcagactcagaaatcctgatcagagattttttgctgccacatgtttgaattctgagacccagccggcttttaagtcttgactcctattcccttccccaggtctgtaaaacaccatctctacctcttgtacctggacctctcctccactttatgtccattggtaccccctgctttcttgaattttcaagacaatctgagcacgcgaggggaggggcagacaactcaatttcttatcttcctgctctactctacaattctaaaattattccaaagtttctttaaacatatttagtatacttgttgcgaagagatttatccagacttacctctctggatcatcaaaaatgcttggaatttacagtgtaaataaaccaaaggtgttcacaaaagagtcaggttcttcctcttcttcttcttcttcttcttcttcttcttcttcttcttcttcttcttcttcttcttcttctgcttcttcttctgcttcttcttcttcttcttcttcttcttcttcttcttcttcttctgcttctgcttctgcttcttcttcttcctcctcctcctccttcttctcctcctcctcttccttctccttcttccttctccttcttcctttttcttcttccttcttcctccccttcctcctcctccatcgtcctggaactcccttctataaaccagactggcctcaaactcaaagagacccatcccacctgcctttgcctctggagtgctaggattaaagtaagtgctaccaccgcctagtcgggtgattttttttttttttttttttttttttttttggtaaaagatcttgttcatggggctggagagatggctcagaggttaagagcactgcctgctattctagaaatcctgagttcaattctcagccaccacagggtggctcacaactatctataatgaggtctgttgccctcttcaggcctacaggaatacatgcagggagaacactatacataataaagaaatctttaaaaaagaaaatcttctgtatagaaaatatcagcagagtcatctgacacaagcaacctgtgtgctggaccgagttcggtggcgacgggttccgaacaccaaacacccagagccagcccaggtagcccagaagttgtttctggctcctgtttgtcttcgctgctcagagtcatctgatacaagtgacctgcgtgccagacagagttcggcagtgggatccaacacacctaggccccgtgacaactctgactccaactgtcagctcggcaggacccggcacgctcgaacactgccgacatccagggaacagtgacatctccatccacaagaagagaactgacatctgagtattggatctctttgcatctaccaaaaaagaaccttggtcccacacccaccaagagaacaagaaacttttgctacacccaccagaagaaaggatgagaagaggacaaggtaaaagcacattcaacaacagaaaacccaatatgacaccactggagactaagaaccatacaccagtaagatctgaacatcacgatgcagatgaaccagaagagaatgacattaaaagcatcttcatgaaaatgatacacaacctcaaagaagacatgagaatcccttaaagaaatgaaagaaaaaactaaccaaaaaatacaagatatcaacaaatctctcaaagaaacagttcaagacctaaaaactgaaatagagacaataaagaaggcacaatctgagggaatgctggaaatagaaaagctgggtaaatgatcaggaactacagatgtaagcataaccaacagaatacaagagatggaagagagaatctcaggagttgaaagcacactagtggaaatagattcatcaaccaaagaaaatcttaagtccaacaaatccctaccacaaaatatccaggaaatatgggatactgtgaaaagaccaaacttaagaataataggcatagaagaaggtaaagaaatccaactcaaaggtgcagaaaacatattcaacaaaatcatagaagaaaactttcccaacctaaagaaagacatgccaatgaaaatacaagaagcctacaaaacaccaaatagactgaaccaaaaaaaaaaaaggtcacctcaccacataataatcaaaacaccaaacatacacaacaaagagaaaatattaagagcagcaaaggaaaaaggtcaagtaacctataaaggcaaacctatcagaatcacacctgacttttccttggaaactatgaaagccagaaggtcctggatattctacctacactaacagaccatggatgccagcccagactacgatacccagcaaagctttcaatcattatagatgtagaaagcaaaatattccaagacaaaaccagattcaaacaatacatatccaccagtccagccctacagaaagtactggaaggaaaacttcaacccaaggaagttaactacaaccagaaaaccataggcaatagataatcccaacttaccaacagtcaaaagcaaaaagggatagaatcccacacataatctctccaccatcactaaatcaaaattaaacaagaatgaacaataatcattggtcattaatatccatcaacattaatggtcttaactcccctataaaaaagactcggatcagcagaatggctaagaagacagaatccttccttctgctgcatacaagaaactcacctcaacctcaaagacagatggtacctaagaattaaaggttggggaaagatcttccaatcaaatggacccaagaaacaagtaggggcagcaatcctaataaccaataaattggactttaaactaaaatcagtcaaaagagatgaagaaggtcatttcctactcatcaaaggagaaatccatcaggatgaagtctccattctgaacatttatgcctcaaatacaaaggcatccacgtttgtaaaagaaaacattactaaaactcaaatcacacataaaacctcacacacttatagtgggagatttcaacaccccactctcaccactggacaggaacaccagacagaaacttaacaaagaaacaaaagaactaatagaagttatggtgcaattggacttaacagatatctatagaacattccacccaaatacaaaacaatttaccttctcagcgccacatggaattttctctaaaatcaaccacatacttggcaacatagcaaacctcaaaaagtacaaaaaaattgaaattgaaataaccccctgtgtcttatcagaccacatgctttaaaattagaattcaacaacaacacgaactacagaaaacctacaaactcatggaaattaagtaacaccaattgcacaattcatgggtctaggaagaaataaaacaagaaattaaatatttcctagaattcaatgagaatgcagacacaacatatccaaccctatgggatactctgaaagcagtgctaagaggaaagttcatagccctaaatgcccacatgaagaaacaggagaataatcacactagagaattaacagcataactgaaagctttagaaaacaaacaagccaacacaccccagaggagcagacaccaggaaataatcaaattgagggctgaaatcaataaaatggaaagtaggagaacaatacaaagaaccaatataacaaaaagttggttctttgagaaaatcaacaagatagacaaacctttatccaaacttaccaaacaacaatgagtgaacatgcaaattaataaaatcaggaatgaaaagggggacataacaacagacacaggggaaatccagagaatcatcaggtcatactttgaaaacctatattcctcaaaatttgaaaatctaaaggaaatggacaattttctggacagatttcatttaccaaaattaaatcaagaacagataagcaacttaaatagacctataacctctaatgaaattgaagcagtcattagaagtctccctaccaaaaaaagcccagatggcttcattgcaaaattttaccagaaattcaaggaacagctaataccaattctcctcaaagtattccacacaatagaagcagaagggtcattgccaaactctttttatgaggcttcaataaccttgatacccaagccacacaaagacacaactaagaaagaaaactacgtaacaatatccctcattaacattgatgcaaaaattctcagtgaaatattggcaaatcgaatctaagaacacatcagagaaatcatccatcccgatcaagtaggcttcatcccaaggatgcaaggatggttcaacatacaaaaatctatcaatgtaatccaccatataaacagattgaggaaaaattgcatgttcatctcactagattctgaaaaagcctttgacaaaatccaacaccccttcatgataaaggtcctggagaaatcagggataacaggaacatacctcaacataataaaagcaatatacagcaagccaacagccaacatcaaattaaatggtgggaaactcaatgcaattcctctaaaatcaggaacaagacaaggctgtccactctctccatacctcttcagtattgtccttgaagttctacttagagcaataagacaataaaaggagatcaagggaatacaaatcagaaaggaagaagtcaaactctcactatttgcagatgatatgatagtctacatgtgaccctaaaaactcaaccagggaactcctacagctgataaacaccttcagcaaagtggcaggatacaagattaactcaaaaaaatctgtagccctactatatacggatggcacattggtgaagaaagaaatgagagaagcatgaccctttacaattgccacaaacaacataaaataccttggaataacactaaccaaaaaagtgaaagacctgtaccgtaagaattttgagtctctaaagaaagaaattaaagaagacaccagaaaatggaaagatctcccatgctcttggataggcaggatcaacatagtaaaaatggcaatcttgccaaaagcaatctacagattcaatgcaatccccatcaaaatcccaacacaattcttcactaaccttgaaagaacaattctcaactttatatggagaaagaaaagacgcaggatagccaaaacaaccctgtacaatagaggaactgctggaggcatcaccatccctaactttaagctctattacagagctatagttctgaaaacagcttggtattggcacaaaaatggacaggtagaccaatggaatagagttgaaaaccgtgatattaacccacacatgtacgaacacctgatttttgacaaacaatccaaatatatatgctggaacaaagagaacatcttcaacaaatgatgctggcataactggatgcaaacatgtagaagactaaagatagacccaagcctttcgccctgcacaaaacttaagtcaaaatggatcaaagacctcaacataaacccagccacagtgaacctactagaagataaagtgggaaatacccttgaattaatcggtacaggatactacttcctgaacataataccagtatcacagacactgagatcaacaattaataaatgggacctcctgaaagtgagaagcttctgtaaggcaaaggacatattcagcaagacaaaacgacagcccacagactgggaaaagatattcaccaaccccaaatctaacagagggctgatctccaaaatatacaaaaaactcaagaagctagtctccaaaacaccaaattaaatccaattaaaaagtggggtatagaactaaatagataattctcaatagaggaatctaaaatggctgaaagacacataagaaagtgttcaatatccttagccatcagggaaattcgaatcaaaacgactctgagatatcatcttactcctgtcagaatggctaaaatcaaaaataccaatggcagtttatgctggagaggatgtggagaaagaggaacactcctccactgctggtgggagtgccaacttgtacagactctgtggaaatcagtatggcgactcctcaagaaaatgggaatgagtctaccacaagatccagcaattccactcctagacatatacccaaaagaagcacattcatataacaaggacatctgttcaaccatgttcatagcagcattatttgtaatagccagaaactggaagcagcctagatgcccctcaaccgaagaatggatagagaaaatgtggtacatttacacaatggagtactactcagcagaaaaaaaacaatggaatcttgaaatttgaaggaaaatggatggaactagaagaaaccattctgagcgaggtaacccaatctcaaaaagacaagcatgatatgtactcactcatatgtggacctgctttatgatccatagtagtgacatgctttatcagaactgtttttaatgttgctcagaatggtttccttccagatgatgactgagaagctaatttaaaaaaaaaaatggtgccaggtaccacaagagtaacagaactgtgctgttttctggaagtttgttttttactttttttgtttgtttgtttgtttttaatggagtgtgctggatgtctctacaattttgttcaaatgactgcagaacctggaaaagctgttgctgctattgatgcataacatactgctattattggtctttttacacacacacacacacacacacacacacacacacacacacacacacacatatacatatatatatatgtaatttgaatttttggaaactttagctgtgctgtcaactttggaaaaaagtatcccagtttaccgtgttgagttggaattgtacagaaattaacagccatattggtctagaaatgttgaacttaatttttttccatttgtacaggggtaacgcactgtattaaatatgtaaggtcttaaaaaaaagaagggattttgagagcccatcccatgtgaagggatactctcttggcctggacacatggggaaggacctaggcctggcccaggatgatgtggtagactttggggagccccttttgagggccttacctgcctggggagtggaggggggatggctaggggcaggtgggatgttgggggggaggggaggcagagggagaagggattgacatgtgaaacaagcttgttcctaatttgacctaataaaagaataaaaaaataaaaaaataaaaaaaaaatcttctctctaaagaataagaaaataaagaactacagacaaatatccctcataaacatttaaaaaaatatatcagcaactgccaagcataatcctagcactaaagacacagacgtcagtagatctctgtgagtttgaggtcatcctagtctacatagcaagttccaggctagtctaaagggaacattgaaagaggtgtccaagcagaaagagttatccttacagaacatatatgcatttactacgcatacactcaacacacacagagagacacaaagagataatcagtctcactgaaaataggagacatgaaaatcaaaagcatttaaatggcaaaaataataaagtctgatgacaccatgtatttgagaggataagaattaattggctacatcatgaaaccctgtctcaaaaaaaaaaaaaaggcaactagcacaaactataacatctttatttcctaaccctgtgctaatcataaaacactaaacacaacatttaacattaataatttctatacttcaaaccttcaaccatcaataaaattaaagatataatgagaacgtatgttttaacacatatatcaacagattaatagcaagtaatattcatttataaagagttcctattaatcatctaataagaccaagaggaaaagacaatttaaaagaaaatttttcagacatggctgagtgttttagaggaaaaagaaacacattcaataaatgcatgaagaactattcaatccctggggctaagtagatgacacacaaagagatatttggactcacgaagaattagagacatgcaaatcaagagtatttaattgaaaaaaataatgaagtctgatgacaccaagtatttgagagaataagcattaattggatcaataatatattgctgatgggagtgtaaatttgctgcatttttggaaataaattgaaactaccctctgaagtcaaatattcacaaatctaacaacccagcaattcgacttccagttataaacccatatatccatgtagttgggttttttttttttaactcttaattctttgttcttttgggagcctaccactcagctcccaaataaatcacacagggaggcttagcttggattgtttctagccagcttttctgaatttaaattgtcttatttatctttttgcctctaggcttttatctctctcttacttctgtaatcttactttcagtcttgctctgtgactggctgtgtagctgggtgacttgaaggccccttgagtccttctcattcttagactgctcctcctatttattctctctgcctgccagccccaccaatccttgttggccattcagctctttagactaatcaggtgtttcagacaggcacagtaatgcagcttctcagagttaaacaaatgcaatataaaagaatgtgacatatctttacaccactaaaacaagcgttccactgcataaacaaatgtaacagtcttaaattaatattccacaacatatccaaatgaaattaaactcatctgaacctaggatgtagctagaaatacacacaacaatgtttgcagcacaatgctcataattttttttaaaaaaattaggttttgagagattgctcaggggttaagaacacttgtttctcttgcaaagaacctgagttcagtttctgtcacccttgtgcaggcttaactccagttccagaggattcaatgccctcttctagcatttatgggaatgtatgtatatgtctatacatgcaggcaaaacacccaaacacataaaataagataaaaataaattttaaagcaccagggtctgggttgtaatgcaggcagaagaatgattgcttagaatgtgagaagccctgggctcaatcttcagcaatggatagagctgaacaatgatagtggtacatgtctgtaatccaagttcaaggtcatccttggggacatagcaagctttaggccagcctgtgatgcctggaaccatgtctcaatcataataataattagtaaataacaaaaattactggaatcactgagcaaggtgatgtatgcctttaatcccagcacctgaggagcacaatgtcctagtttagggttaccaatgctgtgatgaaacaccatgaccaaaggctacttggaaggaaagggtttatttcactcatatgtccatatagcagttcatcatcaaaagcagtgagagcaggaacttgagcagggcaggaaccttgctgtgtagcccaagttggccttaaactctctatcctcgatttttgctgtctggccagtgtaaaatagtatctcagagttattttgagttgcatttccctgatggctaaggatgttgagcactttcttatgtgcctttcagccattttagactcctctattgagaattctctatttagttctgcaccccactttttaattggattgtttggtgttttggtggctagcttcttgagttctctgtgtattttggaaatcagccctctgtcagatgtggggttggtgaaaaccttttcccattctgtgggctgccattttgtcttgttgactgtgtcctttgccttacagaagcttctctgtttcaggaggtcccatttattaattgtcgatctcagtgtctgtgctattggtattatgttcaggaagtggtatcctgtaccaattcattcaagggtacttcccactttctcttctaagagattcagtatggctggatttatgttaaggtctttgatacatttggacataagttttgtgcagggcgatagatatggatctatctgcaatcttctacacgtcagcatccagttatgccaacaacatttgttgaagatgctttctttattccattgtataattttagcttctttgtcaaaaatcaggtgttcgtaggtttctgggttaaaatcagggttttcaaatgggttccattggtacacctgtctatttttgtgccaataccaagctgttttcagaactatagctctgtaatagagcttgaagtcagggatggtgatgcctccagatgttcctttattgtacagggttgttttggctatcctgggtcttttgtttttccatgtaaagttgagtattgttctttcaaggtctgtgaagaataattttgggattttgaatctgtagattgcttttggcaagattgccacttttactatgttgatcctacctatccaagagcatgggagatctttccattttctggtgtcttctttaatttccttctttaaagactcaaagttcttgttatacaggtctttcacttgtttggatagtgttaccccaagacattttatgttgtttgtgactattgtaaaggttgatacttctctgatttctttttcagcacatttatcgtctatatataatagagctactgaattttttagttaatcttgtatcctgccactttgctgaaggtgtttatcagctttaggagttccctggtagagtttttcaggtcacttatgtgaactatcatattatctgcaaatagtaaaagtttgacttcctttgcaatttgtatccccttgatctcctttgttgtcttattgctctaagtagaacttcaaggataatattgaagaggtatggagagagtggacagccttgttttgttcctgattttagaggaatcacattgagtttctctccatttagtttgatgttggctgttgttttgctgcagtctatgctggagaagatgtggagaaaggggatcactcctctactgctagtgtgagtgccaactggtacaggcactttggaaatcattatggtggtttctcagaaaaatgggaatcaatctagcacaagatccagcaattccactcttagacatatacccaaaagatgcacattcatacaacaagggcatctgttcaaccatgttcctaacagtattatttgtaataaccagaacctggaagcaacctagatgctcctctaaagaatggatggaaaaactgtggtacatttacacaatggagtattactcagcagggggaaaaaaaccaatgaaatcttcaagtttgcaggcaaatgaatggaactgaaagaaaccatcctgagtgaggtaacccagtcaccgaaagacaagtatggtatgtactcactcttatatgaatattatacacagaacaaaggactaccagcctataatccacaccaccagagaaactgggaaacaaggaggaccctaagagagaaaacacatggttcctcaaagaaggggaaagggacaagaacacctgagaaaattgggagcatggaagggagagaggagagagataggaaaaagagaaggggagaagcggatgggggaggagaacaagagggatcaggaagactgagacaggggaggaatagaagagagcaacaaaagagataccttaatagagggagccagtataggtttaaagagaaatctgggcactaggttcagagatccacaaggatgaccccaactaagaatctaggcagtagtttcgaggctgcctttgacgcccttcccctataatgagattgatgactaccttaattgccattctagaaccttcatccagtagctgactgaagcagaagcacgcacccacagctaagcactgagccatactccaggaatccagttgtagagagggaggagagatgagcaaaggagccaagaccacgctggagaaacccacagaaatatttggcctgacctagtgagagcaccgggaccccagttataaagctggggaaccagcattggaccaaaccaagccctctgaacgtgggtgccagctaggaggcctgggcagtctattggacctctaacagtggagccagtgtttattcctagtggacaattggactttgggagcccattcactatggagggatactgttgcagcccagatacacagaagagggcctaggtcctttcccaaatgatgtgacagactttgatgatcccccggggagggcctcactatccttggggagtgggtgggttgggagggttggtggggggcatgggaggatggggggcaagagaatggggggattgatatgtaaaatatgattgtttctaaaataaaaattaaaaaaaaaactctctatcctcttgcctaagactccccagtgctgggattacaaacttgagccatccacacttgtctgataaaagtaatataaacagccgggcgttggtggcgtacacctttaatcccagcactcgggaggcagaggcaggtggatctctatgagttcgagacaagcctggtctacaagagctagttctaggacagcctctacagccacagagaaaccctgtcttgaaaacaccaaaaataaaaaaaggtaatataaacaatgtaacgataaatagaaattgagataaaagcaatgcctgtgggtcaaaaggtagagtgatgggagtggggcattgggcaggtcgaggtcactgtgttgtctcttctgggttgacaacttgactacgtctggaatgaactaaaacccaaaattggagggtcacaactgtgaaggattcttgcttaatttgcagtaggaagatccacttctaatccagatctttgaggtgtaaagacacatctttaaccagatctttcgagctaggaaaccccacctctaatctggaccatgccttccgctgaaaacctacataaggacatgtaagaagaaatctctctccttttgcctgcttgtcttgccctcactagcaaatccattctttcactggtatgaaagccaacttctttgggattacagcatatacttaagaccaatatgagacatccagatactgaactgaacaactactggattcttggaccttctgttcataggcatccattgttggattagctgtaccaaggcttttaagtcattctaataaatccctttctatttatatatatatagagagagttcattctatatgttctgttactgtagagaaccctgactaatacagtcactaatagcattctagttctttgggttgtgacacggcttgtaagggaaggaaggaaggaaggaaggaaggaaggaaggaaggaaggaaggaaggaaggaaggaaggaaggaaggaaggaaggaggaaggaaggaaggaaggaaggaaggaaggaaggaaggaaggaaggaaggaaggaaggaggaaggaaggaaggaaggaggaaggaaggaaggaaggaaggaaggaaggaggaaggaaggaagaaaggaaggaaggaaggaaggaaggaggaaagaagtcagggaagggggaggaatagactgaagattgttctattacacatctctaatgtttttccaaccattaagaatatcatctcatcataaatcatttcaggaatcagtaatattcatttctgttcctaggaggcacaaggaatactacttcctctctttgaagttaaactgaactgtgcaatagttctatccacaaaatagaagcagagacattttgaggctaaagtctctgagaagagcaagacagcaatcaacctattttccaaactcaataaatacgtaaaatgtgtagcatttgctatgttggtcatctttctgtcactgtgacagaatacctgagataatcaaatcctaaggaagaaaagtttattttggctgcagtttcaaccaggagtcagttgacactgttgcttgggcctgtggtgaaaacatcaggaaggaaaacatgtggtagccatggtgaccacaaagcaaaggaagaaatatgagggaaccaggccaggaccccagcacttccttcaagggcaagcctctaatgtcctaacttcctcctactataactcacttctaaatggttccacccccttctaatagcatcacagattagcaatgaagccttcaacccagagcctttggatgacacagaactgtagcagtaggcttgatggctaaacaagcatgtttgtaagtgatagagaaatgttagacatgcactaatggtaatcctagaaggcaaggacagtaggactaccataagtttaatgacagcctgaactgcatagggagtttcaggctagccaggaacacagagtaagatcccatcacaaaaaaaaaaaaaaaaaactaaagaggacaaggggaagaggcactattagctgccttcgtggtaagaaagttagtgctggggtactagagtggggcatgcaaagcactgtcattggaactcaaagcttttgttgtatctactgcacttaagtgctgaggaaaggcatcttgccagctgtggtcatgcacacctgtgatactagggaagtagaagcaaaaggaccggcatttcaagggcagccttatctatataagaagcttgaggccagtcttatctacataagaccagaaacatcaggaaaacagtgtcaacactgtggcagctgcctgccttcagtaatttattattaaagagatgcccttatctgggtgtgatgggacatgcctgtttttccagcatttgggaggcttgaacaaaaagactgaaagtctaaagatagcctaagctacattatagaggccatatcttagcacaacagggagggggaaaaggaggggagaaaggcaggcaggatggaaggaagaagagagacaagagaaaggagagaaaagagaaaagaaataaatgcccttaaggaaaggggggactagagagatgtttccgtgggaaaagatagttacctccctgggaaggagagaaccaactcccacaagttgtcctctgacttccactcatgtactagccatgtgcaatccacacacatgcacacaaaataagtacagtaaaatttttaaagaaaacagattccccagtttcttgttacctgcaccttgaccagttgtgggtctctatgctaatcatcctctgctgtaatcagaagtttctctggtttgagagactgagcattgggagatgcattgatctgtgggtataagaacaagtcatcagaatggctaagatgaaaaacactgatgacagcttatgttggagagcatgtggagtaaggggaacactcctccactgcttgtggaagtgcaaactggtaccgtcattttggcaatcaatatggtggtttctcagaaaaaaaatgggaatcaatccacctttaagacccagctataccaatcttgggcatatacccaaaggatgctcaatcacaccacaaaggacacttgctcaattatattcatagcagcattatttgtaacagccagaacctggaaacaacctagatgcccctttactgaagaatggataagaaaaatgtggtacatgtacacaacagagtattactcagcaataaaaaacaatgacctcatgaaatgtgcactcaaatggatggaactagaaaaaaattatcctgagtgaggtaacccagacccagaaagacaaattggtatgctctcactcataagaggatattagaagtaagaatcagataaagctagagaagctagataacaaagaggacccaaagagggatgcatggatttccctgagaagtagaaacagaagagagctcctgggtaaattgggacgggtggggggatgggagatgggaacttgagggagctggttgggtgggctgggtacaggaggcagattgggggcaggaaagagggctagggagaaacctggcaccagaaaaactcccaggaatccacaagaatgaccccaactaagaccccctatcaatagtggagagggtgtctgaactagccatatactgtaatcagattggcgactaccctaattgtcatcacagaacctttatccagtaactgatggaagcaggtgtaaaagatccacagccaaacgctgggtcaagctctgggagtcttcctggagaacaggaggagggactgtatgagccaggggggtcaagatcatgacagaggaacacacagagaagctgacctcagctcatgggagaacatgaactctgaaccaacagttaaggatccagcatgggactgacctaagccctttacatatatgtgacagttatgtgtcttggtctgtttgtaaggctactagcagtgagatcaggacctgtccctggcacatagctggcttttgggaacctattacccatgctggattactttgcccagcctctatacagggggaggagctcagtcctacctcaatttggtgtgccatgctttgttcaagtccatgggagagctctctctttctgaatggagacagaggaggagtaggtagatggggggtaggggacagcaggagaggatggaagggaaactgtggttgatatgtaaattaaaggggaaaaaagaaaaataaataaaatcccaaacttcagtgaaataaaagaaaagaatacatcatcagaagtagattaaaactatgtccagcaacacaaatagacaggttaaagcagaagggaaaagctcaaaaggcctcacccctacacaatgaacaacagacaactaaggaatgctgaaagtggaagaaatcttctttcccagagaaaagcacaccaattggttatccaatacagaatggaaagtcctaaggacatgtacatacaagtaatattatatagactgagcagcttgtacttatacatttaggaatatatgtatatatgtgtgtgtgtatatacatatatacatatatacatatatacatatgtacatatatatatatatgcagcattaacaacaacaaaaagcagcaatgaatttgagaggatgggagagggggtaaatgatgtcatcaaaatctcaaaataataataactgatttaaaaataaagaaagagaaaaacctatgcccatttagcagaatagtggtagggtctcctatagaatcatgtggcaagtatgagtttcactttgtgaaacaggccttaaatacaatcagaaattattggttactcttataacgttcatgccactattgcaacagtgaggtgatttgcttgattgcattcatggatgttggtagcattattccccagaacttgggtactgggttgaataaaagggggaagctagcagagctagtgcatacattgattcatttctctcttatttcaactgtggatgtcatgtgactagctgtttcaatttcctgccttgtcttccccacagtgatgaaccacaacctggaattttgagctaaaacttttctcccctaagttggtttgttgttgttgttgttagagtatcttattacaaaaaagaaatgaaattgagagcctttgtgaatctagtcaatttcatgaacttcctgaatctagtaagttatgtttacttctagagtcttatcaggctacttcctccctccaggaaaaaaaattcttcaattcagagaaaatatgtacagaacagtgaaaaacacagatgcaatttaaggtatgggatggggatggagaaatagcttagtgtttaggagcatgtgctgctcttccagaggactaaagtttgattcccagcactcaggtcaggtggctcatggggcctgtaacttcagttccaaggaatccaatgcctctagcctctgtggcaccagctggggaccaagcatcctacacacaagcctgtagtagacattccacatccaaagcatactattttgtttctcaatgtcaggaatcagaattctgggctacagcaaaccactggccacatccaggccatctgccagtattatggattgtcagaagggtatcaggaaggatcatccatttgtttcccagcatctgggtctctgtctccctccaagactaggcagcacaggagagatttcttcaaaggaagaaaatcataatattttgcaagcatctgcatacattctcattttggtctttaccccttgaggtagagtttgttataaatgtttggtgtgaatcctgagattcagagagatgaaataataggagaaataagctattttctccaggtgatagaacagttaggtagaaaatctaaacaatagctgcagatcaattgtcagaatgaatgaaagaacattttattgaacacaaagctaacacggaaatcagttgtatctaaatagtatgagaccctggatttgagctaagtcttcaggcttgcaggaagttgttttttacattataacttgctgctgtcagaataagcatttctcgtggaatctaagacatgttgatgaacaactgcgtatcatgaattaataaaaagacccagagactgatattggggttgaagctgaagatcagaaaagcaaatgagcaggctactaggatcaggctgtatggactgatcctgtctccaccagctttcaccaagcctgactgtaacctctcctcccgtggctggagaacgaatgcctcttgctgattactgaagatcctgcttctatcttttatacccctttagtgctgggattaaaggcatgtgatctgttactcttttaaactgattcaatctcgtgtatccctgggtgaccttgaactcagagagattcgtctatctcttaatcctgagtactaggattaaaggtgtgtaccaccacctcctagcttctggctgctggtattaaaggtgtgtgtcaccactgcctgatctctatagccagaggctgactttgcttttctgaatactcaggcaagctttaataagtcataaataatatatcactatacaactgtactgtgcaggataaatcacaagcaacaatatgtcactgaatgaacatgaatggttaccatctttagagacagaaagtctagtgctataggaagtatacattttatttgaatcctggtcttagacccagatgaagccctattctcttttgctagtgcttatggagctatgtaaatttacaaagaaaatattggcttaacaagtacggtctgatgaaagtttcataggaactgccgaaggggccatgttcttgctattgccctaagataaccctgtatacaaggatgaagcaacacctaggaggaaggactccattccactgagggaaagtgcaaatagcagtgatactcagagaatggagggatgaccctgagacaggacacatggagcaggagcaccagaggacgtgtgtactgatcaggctctgaatatgtggtctggggaccactgtaacaggctcacagaacttagcacaactgatgccatgttagatgcaccaaggcaccggcctaaactaggagcccatcacatagaccctacacctgccaaaatgagaacaaagacctaaaccattatagttcatagttctgagaaagtctctaaatgtactaaccttgcctttttagattttatagctctgcatattgctaactgtttttgataattgaagtgtatgtcaaccatgatctcattttgtaagtaagaactaaagaagagtaaggcttgtggctatactatgtagctatgccatttgggctagacggtttctatatagtcttccagccagtgaagaaggactttctgttggccctgagagtctgtgtgtactctgaaggagtagccccacaacaccattgtcatttgaggataagttagttaaaccactcccaactttttattcatttgtggtgacacttctcttcccaaacagtgtcccctctctcagggctccactgagctcactgtctttctctgttagaaggacaaacaagcaccgtattccttttggtcattgcttgtctccactgcatggggaagaaggtggggaggggtgatgtccacaggcactcaggattgattctatgatgtctttcgctgtggctgtgggatagcagaggctgagaggattacccagcttctacagccagagctccaggaatcgggtgtcctgtgtagcaccagagaagtaactctaagcaagggctgtgagttggacaacagggctgggaggtggggaagctggggaggtgaggctgcaggaggagtggccactgtgtaggctgagtagattgatgtggtctgcctggacagaaattgcttgtgcatctttggcatccaagcccaaggtagacaatggtcacctggggcacctcactgggggttcttctccaggggctgctacaggatcattggggtttgaggtatgagcacaaaaggtagaatttaagataagcttgtggaaaagtgaagataaatataatatttattttgatcatcttgatagatgtagaaaggcagtgtgtataagctgacattcattcacaacagaacatccattcacagggcctggggaattaattcattggataaagggcttgttgggttattagtcagggtgctgacttctaaaaaacagactgatagagtgtgtttgtttgtgtttgtgcatgtgtgcacacactcgtgttaatgggggattttttagagtagcttacaggctgtggtcttagtagtccaacaatgaatgtctatagagtctccacaagaagactcaggacccagtggttgttgagtcatgagacttaatgtgtcagcagtcccagtctggtgctggagtcccagggaaagcctagagagctgtcagtctttgtctatatggaaatctcaaagaagtatgttataacaccaacaaaggaaaaggaatgcctcaggaacaggacattcaaactccccagcaagagtgaagacaagcaggcaaaaagcaaaagcttccttcttctatatccttctgtgtgggctacaaccagagttggggtctaagttatggtgcatcttctcaccgcaaatgatccaaccaagcaaatccaccacaaggacatccagctgcttcagttttagctgattccagatgtggtcaagttgacagccaggattagccgttatactgctcaagtgtaagtttggatccccagcacacacataaaagttgggtacagcagggtgtacctgagtcacatccgtgaggaagcagagatgggtggatccctggcccttgctggacagccagtccagctacacgggcaagctctgggtttacgaagagtccctgtctccaaaattaagatggacacagccaactagatggctcatcagatgcagacattcaccaccaggcctgaaaacctgagttaatgcccaacccatgtggtggaaggagaaaactgactttctcaagttgtcctctaacttccacacatgcacacacacacacacacacacacacacacacacacacacactctctctctctctctctctctcacacacacacacacacacacacacactcacacacacacacacacacacacacacacacacacactgaaataaattatttttttttaaataaggccaggatcactggcttacacctttaatcacagtactcgtgagacagaagcagatgaatctctgagttccgggccagcctgatctacagagcaagttttcggacaaccagggctacaaagagaaactcagtcttgcagaaaaaaggttttttttttaatttaagtaatgtgtgacgaagcacaccttaaagaaagcatattgccccctacacacacacacacacacacacacacacacacacacacacacacacacacacacacacacacacacacacacgcctgtttttcaaggttggtaatcaagcccaactctagtttttttcatattcttgtcatcatgtgttcgcttcatcaaaacttccagctacacacaacacagagtcaaacttggcccagttcagtctacatcacaagaagaaaggtcaactggggtaacttctgtcccctgaccttgctctcaccaccactacccagatcatcattgccaacagtaggtgtaacacgctcactggttctacagactcactactaacgtctctgctgcataaggaagctgatctaaatgagttccatagagagcaagagaagaactggagagagcagctgccatgctgccatacaacccactggccaccagcgattggcttgctttgcttccagttgtgcagaattcagccctaaaatcctgtcctgacagtaaaggagagggaaagcatgggagtgacccagcagatgttaaacacagcagaagccagcaaatctctctaagtcctgctcaaattgtagcctccagacaaaagaaatgattcctgttttaaatcactgaatcacacagagaggtaaatgacacaatcactaggacatgggctttgaaccccagatgaaacagagtgacaacaatattgttaatgggatcacaagaatcatcatggtggcagtggcagtgatatgtgtgtctggatatgactctgtgtgtctgtgtgtgtctgtgtgtgcctgtatctgtgtgtgtgtgcctgtgtgtgtctgtgtgtgtgtgtgtgtctgtgtgtctgtgtgtgtctgtgtgtgtgtgtgtgtgtgtgtgtgtgtgtgtgtgtgtctgcgtgtatgtgtgtgtttctgtgtgtgtctgtctgtctgcctgcctgtctgtgtgtgtgtgtgtattgatttttttttttcagacagggtctgtctcctgtagttcaggctggctttcaactcaccatgaagacaaagatggccttgaatactttatctctacctccgaagtaccaggattatggttatggaccttcattcttacttaaggcctgggttttataaggatccatattggcaacagtgtggtgttggggtatattccatcccactgtaaaaaccaagttcaaatttgtgttaattaaataaaattaaccatggatcaggaaaatgagtaagcaactaactgacaaaaagtaatcacagagcatcagagggcatctggacaagataaagaaagaaaggcactggaagtgtcagggaggggttttgagtggtgtggctttttctgtcttggtagagcagaaagatgaactatttctgggagacaccagcaaagagaggcagttagctaggggctactcaccctctctgagctaccaggtttcacccaatccttggaatcttgagttttatttataaatagaatgacagaaatttagtaaaagctaactttagagccactgcctgtgagagaagaattcttgccaggcttagatctgagaggccagagcactgccccagaagctgggaggtacctgcagagtcacaattgctggttaaaataacagtggatgaaggtgcagccactttgctgaaagataaaacaaccatgtggagagagattggagtcagccaatactggaaacaaacaacttagaatgctcaaaatggaggctaaattcttgctgtatatgtccccagcatctggcccatggccaagtcattgtcctaagtcaggtgtttcactcctttgccaggagttacttcaagaataactatatatatttggggtgaattgtggtaatttcatgtggaagtccttgtccagtgcctcagatggtgcttacgtttgcaaatagggttttaatacagtgattgagtgaaaactattcattaggacagctcttttttattttattcttttattagttcaaattaggaacaagtttgcttcacatgtcaatcccttctccttctccctcccctcccccccaacatcccacctgcccctagccatccccactccactccccaggcagggtaaggccctcaaaaggggctccccaaagtctaccacatcatcctgggccaggcctaggccctccccgtgtgtccaggccaagagagtatcccttcacatgggatgggctctcaaaatcccttcattttttttaagaccttatatatttaatacagtgtgttgcccctgtacaaatggaaaaaaatcaagttcaacatttctagaccaatatggctgttaatttctgtacaattccaactcaacatggtaaactgggatacttttttccaaagttgacagcaaagctaaagtttccaaaaattcaaattatatatatatatatgtaaaaagaccaataatagcagcatgttatgcatcaatagcagcaacagcttttccaggttctgcagtcatttgaacaaaattgtagagacatccagcacactccattaaaaaaaaaacaaaaaaaaaagtaaaaaacaaaatctcataaaacagcacagttcttgtggtatctggcaccattttttttaattagcttctcaatcatcatctggaaggaaaccattctgagcaacatcattaaaaacagctctgataaagcatggtcactactatggatcataaagcaggtccacatatgaatgagtgagtacatatcgtgtttgtctttttgcgactgggttacctcgctcagaatggtttcttcgagttccatccattttcctgcaaatttcaagattccattgtttttttctgctgagtagtattccattgtgtaaatgtaccacattttctctatccattcttcggttgaggggcatctaggctgcttccagtttctggctattacaaataatgctgctatgaacatggttgaacagatgttcttgttatatgaatgtgcttcttttgggtaaatgcctaggagtggaattgctggatcttatggtagactcattcccattttctatgggagtcgccatcctgatttccacagtggctgtacaagtttgcactcccagcagcagtggaggagtgttcctctttctctgaatcctctccaacaaagactgttaggacagctcttaattcaatagagctggtctattttcaaaatgaggaagtttgagcccagagggagatatcaggagcacatgcactcagacagaccatggagagaacccagggaggaggtggctgtctacagtcagcagagaggccttggaaggagagtccgctgatgcactcatcttggattcctgtccccagaactggaggaaagaagctgacagtgttcagaccacctaatcttccagtccccaaaagagcactgttgcactacaggacccatctgtggccaatgaggacagtcatgaagaaggtcctaggaaatgcttcctccctcctgaaaaagaactgtaggaaggaagagccattctcccttgtcttgtggtaatacatggagcagcagtagctactctgagctcactcataggtgaagcaagaaggagacagaaagagcttacagccttgaagacataaagaaactgcaatgtcagctaagcctggagcttctctctttctagagttcttatatcatgaggtgatatatttactttttatttcacttttaactgtgtctgtgtgtgtgtgtgtgtgtgtgtgtgtgtgtgtgtgtctgtgtgtgtgtgtgtgtgtgtgtgtgtgtctgtgtctgtgtctgtgtctgtgtctgtgtgtctgtgtgtacacatgagtgagggtgtacatggaggaaactgctattgtagccacctgacatgggtgctggtaattgaactcaggccctaacatttttttattttttatttttattgaaaatagattcttctctcatataatacacgctaccaccttttctcaacctctactccccccatctctcctttccctcaaaatcaacttcccctccatttccactacagaaaagagcaggtctccagaggtgacagccaagagggcaaaacaagacaaaataagacaacaaaaaggccctcatattgagtctggacaaggaaacccagtaggagtgaaacagtcctgagaacaggaaacaaagtcagagataccctctactcccactgttaggagtcccccaagaacaccaagcgaacagccataacatacacactgcagaaccatgcaggccccgtggcttgaaagctactttgaggtggcatttctcttagtcaccactaaatacacccagacctgaacacaggtgtcaaggactgtggggttaggatcaggccagatgaagaacagatataacaggcagtaggagctagacactggtggttagggaggtgacagcctccaaataccctagagtcttagagtcctaggtctaaaaagttataggctgttcgatgacttatgtaccagtaagtaagaaatatataatgacatcaaagctgtcaaaaaaataagagcaggtctcccagggatatcagtccaacacagcataacaagaaggaaatggaggaagaatatctggggagaggggttgaggagtgggggatggaaggagtggaggggtggaggctgcagttgggatgtattgtaagacggaaatgcaaagaaaaagaaaaagaaacatctagtgcaggccctgtcagaggagcggcaggtggcaattgagattcaggagttcaactcactgcaatgcaaggcactgataggtgattcttggataggcaaggcccagagggcttcacttcctaaatgtctcttgctacttctgtgcctttacaggtttgttactgtcatttatctctggcatctggcatggtgtgaatgggtgtggggggagcagggatccccaatgcctttgatgcagtgtgattaaatcataaaaatttccattctcctggacatttttacccgtgaattattatgaagatgatttcctctcaagatgtactgtttaactaaagcaatgattttatacaatattagtgttagtttaaataaaatttgatgattaagagtttttaacaaagatagtaggggattatgacagaggttagtttagtaggaaaattaataccagttaaggtaggatataatgctccccctacccctgataaagcagaggctgcaaagggtacaaaatagaaacaaggaagtgtagtcatatagattatggcttaggttaatgattaggaaaacaattgaggcccaggagttagctcaagttctttttgatattgggaaatttgttcacgagttttagtgtgcattatagctaaaaaataaaataataataaaaaaactttaaacacttgacttcatgcaactagaaaacaaagaattggtcagttaattaaggtaattgtacagaactctaaaataggaaaagtgaaacaagtgaccagtttttctggcaattataatatctactgcttatgtaaatggctatggatgaaagactcctgacctgtgagaaatctaaaagaaaaatatgtaaagatgaggttaagaaatgaattggagctgacttattcaagaaatatgtttttatgatgattatgtagtaactgtgtaacttttggttatggggaaatcctctttgtaatgaacttggtgtggggagtgtgtgtgtgtgtgtgtgtgtgtgtgtgtgtgtgtgtgtgtgtgtgtgtgtgagtgtgagtgtgtgtgtctttctctttttgatggcctaacagaattaaatttggccccctgggtcagccctattgaatcaagtttaactccctcaggtagagtggtcaattgagtgattagtgcaccaacttcatggctccccttcaattcctgagctgctgaaggctggtccttacaccagccatctgggctcactacaataatgtactacagatagggtgacttccaaatcacatgtagaccaagatggccttgaacttattcactaaaagatgtatagatgttctgtgtatgtgaacaggtttgttttggtttggatgggtgttttttttttctgttttttgtttgtttgtttgttttttgtttgttttgaaacaggaatcttatggaccacaggctggcttccaaccaggttatgtagtagagggtgaccttgaacttctgatcctcctactgccacttcccaagggcaagaattccaggcttgccccagcatgcctagtttacatgatgctaagaattgaacctatagcccatgtgtacagggccaacattctaccacttgagctacaagcctgttttattctattctatcagtctatctgagttatattgtgcaaatcagtcctttgaacacacaaagatatataaactataaacttaaccaaaagatgactctcaaagggttgcagtattagcagtagtgtaataaagctttgtactgaagatgcttccttggtgaggaaaagacaattcattccattagagctcaagtggcatcagagaccttgagaagacaaaggtgggggctggagggatagctcagtcgttaaaggctaggctcacagccaaaaatataagagaagacaaaggtgggcatggaagaagctggaagcatcatgggggtgggggattttgagtgatttaatcccaaatgcagtctattgtaaaactccactactttgtggtaactatgagaaaatcaaggacaaaaaagtcaaagttatatggaacacaatttatgcaaactaaagatttttatttattcttaaatgattgtattactattgtgttgttaaacttccccttttatagtcagggtcaatggtgtctgcctataatcccagcatttgggaggtgggatgaagagaatcaggagttcgtggacatcttcacctaaacagtgagtttcaggccagcctgggctacatgaaatgcattcttctatacattgtaccaccactaccctcccaaaaataggcgcttttttctcctatgaaataaggttaattataaatttggggttttttttaagtatttccttgcaagaaagacactaacaaaaaaatccaaacagatgtcaaatgttacaagtctcctaatctatttcctttttgaaaatacacagatcgatggaatacccaaacctaataatactgctggatgcaacatttaatatttgtctttttgagcctttgaatcccatgagtcaacactgtacaaagaactttgctgcaataaacaaaagttgcccctacagtggcatcctgccaggaaagggggagcctggcaaagtctgggcgattcccaccaggctcttcccataaaaggacaagagtctcaccagaaccacactagagtctctgcagaaagaaactccactcagctggcaactctgagtttctgtccaggtatggaggggaaggcaattgctgtcaatggaacaaggaaaatagactccagttcagggagcagagaggtgaggagtttaaggaaaggaaggagcctttcggtaggactggataggagctgaaattgggatgggagaaaaaggtggtctgaatatagagtgacctttatctttctttccctagatgaccatgagcaaactctgcttgctgctgtttctcatcgtggccaccatgggctgcactgcaggtgagtcttactgcaggacccagcttcctcaagtcacctctagatttaaagacagttagcaccagactgggttacttccatgacctgggtctctgagggccagagaacatgcttttgttattgttcttgttgtttttttgctgtttttcaagacatggtttctccatgtagccctggctgacctggaactggattgtagaccaggctggcctcaaactcagagatcaacatacctataactcctgaatacagcgattaaagatgtcagtcaccttgtccaatcatgcctttttaaaaattataataattttaattaaatatgatgcattgttttcccatttgttttcctctttccaactttttccaattatacttcccaattcaacacaaaaataaaggcctctttgtgtttaattgtggggatatatgtatgtaattatgcataacttcctggacatgtaaatacaacctcgtccatcccccagagatgattccactgagatgtaggctggatgctgatatcctcttggaggaattgaccagtggcagtgagattgttgagaatgccctggtacagattctgtacctgtgtgtagctctaggggaacttctgtaagaactgtgtccatcctagtctccccctgtgcttaggaccttggcctaggcatttcaatgtctgatttgtgtccagacaaggttgtattcaattcagctctctacaggagatcaatattatttttaaatgaacaattcctcttcactgctgttttaatgtctttaaggaaaaggacaaaactttaaatgccatctcacttgatctccacatgaaaatctttctcagcttgatatgagacactaaggaattgaggctaagcacagtaaatgcaatccaaacatacttgacttggatctactcacatctgagtagctcagaccccaaagctctcactggtttccatgcttctaggttctcagaggactttgtagggttgaggctggttcgcaggctttctattccatggtctcttggtcaagcctctgcactgtcagtcttgctacccatttttcaggcacattagggtccctgcatttcttcttcctacaactgagcttcactttattctcccttttcagaactttgggaagaaagttctccaccttcaaaccttctcttcctagttggaaatcttgttgattctcagagggaggctttgggaagtcattaggatgaatgacaaggggaggctgggtgtcccatgagagtgaaactctgcatcttctctagctcaagagaacctggataccaacaagctggccaatcctgtgtcatcttctctgttcagaagctgcaaggaaatcaagcaggagatgactagggcacgaggtaagtgatgaagcatttaaagagcacaccgtattccaacacttgagagtccaaagaagatgattaaaagttccaagccagtctggggagatcctgtctcaaaatacaaacaaataacacagttaggaaatcaggattttgtcctcttttttgatataaaaatgtaatagagccaggcagtagaagcacatgctttaatctcagcactcttgaggcagagtcaaccagatttctgtgaattcaaaccaacctggtctacagagtaaggtccaggacagctaggcctggtacacagagaaatcctgactcaaaaaaaaaaaagaaggaaaagaaaaactgatagaatgcacatggcagataaaaattgcacttaaccaatttgaaggtttttcagagtcaataacgactttcacaatggaaggaatcaccactatccatctccagaaagatttattccttaaatgaaaagtctatagccacaaaataaaaaattcctgtattccctgtgagctgctatcctgttgcctacttctatgaatctgtcaattcttgttacctcatatgagtaacctgccttatttcaagggcatgcttcaaatctcatatgtgttgtagaacagaaaatttatttttaaaacatttattgtggtgatacaatatttttgatttattaaagctttctggaggatccagaaagcaaagtcaggcataaaccatagaaaccaggcatacacctttaatcccaggtctcaggattaagaggtagagggatctcttgttagttcaaggccacactgaccacacaaaattgatccagtcctaaagatacacaactcagacaaaggtgatctcagcacctggatcaaataccattaatcccatcgttagagaattatataggacaggagcagggtctcagagctgtgattcagtctcagaagactgtagccactttgcagtctgagtgaaactgaggagcagtgcagttgggctcagttctatgatccacactttggtctgagctgaggtagaggtaagagcgagtggctggctgctttgtttttctgatcttcagcttgaaacttgatccccaatatctgcctctggatctttgattatttcctgctacaatatcttgctatgattgtgaatggattacatgtctgtgtgtgggaatgtgtagatgtgtgtgcagatgcgtgcagagtctagaaaaggccatgaggtcctcagaagctggagtgacaggcacttgtacactgccaagtgttagtgctgtgagcctgcctcgagtcctctgctagagcagtatttgctcttaaaaaatggagcaatttctcagcccacctcactgttcttgctctattggatatacaggaatgtaaataatgtatattctgcatggaagacagcacacgataaggcttattccttttctgtagagaaatactaggcttgtttctttttttcagatttttttatttgaattagaaacaagattgttttacatgataatcctggttcccttctccctcctgtcctcccctaccacaacccccccaaactaaaaccctacctaccacatactctttcttctattcttcccccgactcaacctttctgctccctcatgacctctgcatccttcctcttcttcccttctcattcccatagctccctcccccctcttcttgtgctctcaatttgctcaggggatagtgaccttttccctttcttcaggggaccaagtatgtctctcttagggacctccttgtgtattagcttctttgccagtgtggatagtaggctggtaatcctttctctatgtctaaaatccacatatgaataaatacataccatgtttgtctttttgcaattcggttatctcgctcagaatggtttcttctagatccatccattttcctgcaaatttcgagattccattgttttttccagctgagtagtactccattgtgtaaatgtaccacattttctctatccattctttcgttgaggggcttctaggctgcttccagtttctggctattacaaatagtgctgctatgaacatcattgaacagatgtccttgttgtatgaatgtgcatcttttgggtatatgcctaagagtggaattgctggatcttgtggtagactgattcccattttcttgaggagtcgccatcctgatttccaaagtggctgtacaagttggcactcccaccagcagtggagaaatgttctcctttctccacatcctctccagcataaactgtcattggtgtttttgattttggccattctgacaggagtaagatagtatctcagagttgttttgatttgcgtttccctgatggctaaggatgttgaacgctttcttatgtgcctttcagccatattatattcctctattgagaattgtctatttagttctgtaccccactttttaattgggttgtttggtattttggagactagcttcttgagttctttgtatattttggagatctgtcctctgtcagatgtggagttggtgaatatcttttcccagcctgtgggctgctgttttgtcttgctgactgtgtcctttgactaggcttgttgcttactgtcaggtcttgtgacaagagctgtaacaaacatgaatgtacatatctgagtccctgttcccagttctttgggtatctaccaagtggagctgctgaaagaccccgaagaggtactttcgtagaaggagatccgtacccaggaatcagtgagaccacgagcttggatgcaaactgcaagaggctttattagagacgcgggtacccggggcgacttagcttctgtgtggctaagcgcgtcgagccaagggaaaggggtccttatatagggaaaaaggcgcaagctagaagcagggattctattggataattctaatgaggcattgtacagagctattcccattggtcaatgtaaatgaggcgctatacagggttattcaaatgaggcgaagtatagagtcattcaaatgaggtgaaacaaagagtctttcaaatgaggtgaaatacagagtcatttctattgggtggttcaaatgaggcacagagccattccagaccagcatattctcaaggtctggtgtctggtacaacagactcaattcccccctccgcgtccagatggctgaccttgggggcggagaccttgggacggagtgttcctcatcgggcgggggctcgggggcagggcccaggccggctcacttggtgtttgctctcgtgccggcccatctggtgctcgccctcgtgccggcccacctggtgctcgccctcaggcctcctcgcgggctccttgctcggccccagacccgaggcgtggtgccaggcagggcaggccgggggtgcgagccctgccagggtgtaggcttgggaggccccggcagctccgcggcccccgtgtccttggccttggaggcggctcccggctcgcagctcctggacaagcagcaccgctgctctcccagctcaagttccccttccaggcgccgcccgcgctgcattctccagcccctggccgaaccctggccctgccctgctcagtcccgctgcgctgccctcagtcaactgctcctcccgcctgctccagagagaacacccagcaccggcacaggcggggaagacagaggggcagggggcatgcagaagcattccaagcgggtctttcactgctaagtcctttgatgatactgtgtttaactttagaacaaaaacatcactgtcactttgggtaattctgtgttctgcctcagtcacagacgcttggctttctgaactcaggcacatccccaggaacacctgtgggaggacactcagtgtttgaggcattagccatgtttgtagttcctagagacattctgctgctagaacagagatggaaaatgagcctgcacacaggaggactgtgaactggttctctctacagatggtctctatttcctccgcacgaagaatggtgtcatctaccagaccttttgtgacatgaccactgcaggtggtggctggaccctggtggccagtgtgcatgagaacaacatgtatgggaagtgcacagtgggtgatcgctggtccagtcagcaaggcaacagagcagacagcccagagggggatggcaactgggccaactacaacacctttgggtctgcagagggggccacaagtgatgactacaaggttggtacactctgtagccacctgggagagcatgaggatgtgagtgtagatcaagcgtgccagggagagggtggaaggttgcccttcaacatagggatgaggaagggaaaatacttatcttgaatctcaacatccctcccaagtagtcttttaggtaagtaggtgtggtggtggggccattgtcactgggaatggggccatctgagcatggctggccatctgtccccctggagcccagagacatcagctgtgctgaggactgtacatgtgggtctttctttagtgaaatctcctagtttggtcaggctcagtgttggttgctttccagaaccctggctacttcgacatccaggctgagaatgtaggtatctggcatgtgcccaacaatagccccctgcaaaattggaggaacagctccctgctgaggtaccgcaccttcactggcttcctgaaatacatgggccataatctgtttggcctgtaccaggtacttgagactgctggctgaggctgcttttcaggggtgtggagagagaggcaggtgttggaggttgggtgggtggtgtcccatgttttcctaattctaagtgtaatgtgccaagataggcaaagtgtaggggtatgttgaaaagagaggagaggagagaagcagggagggagaagagaaaggaggagagaaaggggagggaaggggagggaagggaagggaagggaacggaagagaagagaagagaagagaagaggagaggaggaaggaatggggggagaaacccagtgtgtcagagacacacagacaaatgaaatgatcctttcttatctgactggtttgcaaccatctcagttactgcacaaatcctgggtttctccctgcaggacagtgttcctgggattgtcaaagctgtatttcctatgcagtgacttcttttgttccttctagagatacccagtgatatatggaggagggaagtgttggactgacaacggccctgcattgcctgtgttctatgacttcggtgatgctcagaagacagcctcttattactcccccggtggccggagtgagtctgtttgtttgtttgtttgtttgtttgttttgtgttttgtttttgtttgtttgttttggggggttgttttgttttgttttttgctttttttgagacagggtttctctgtggctttcgaggctatcctggaactagtcttgtagatcaggctagtctcgaactcacagagatccacctgcctctgcctcccaagggctggaacagtgagtctctaagtctcctctgaaccttctgcaggacacgtggtaaattcagttatgataagtaacagtcatttaccgtccaccacagcctgattctcttctctgaatgttgcgttttgtttcagttcattcgattgattctccttgggctctcaactatcactaacccattttacagcttagaagactggagcactgaaggtccagaaacttgcctgagagcacagggcataagcaggagagtcaccatttgcactggggatacatggttctagaatctactctttgcaacccactgtcagtcagacaaaccaggtccctgtgcatagagttcaacaataggaaaaaatggagttttatttcatttgtgagggatgactttatatggtttaacataaacacaagtgtggtacatactctttataaatgctgtgcctgtgctgtataattcaaagctcttcttatttatgccctaggtattatcctttaaaagttagcaagataaacataaacaggaccagaatgaatacacttgctaactgctgtaacaaacccttggaggtactcagtagagaccttcttgtcccataagtttctctagtcaagctctggcagatgggaaccttttctcaaagactggctcttggggtctggggatgtgaatagatgaggcttgcccagtgggtctgatattttagactgtttatcctggaactggcaccaccaaactctggtcttgctgctatttctagcattttccttgaatgtttttttctgtcccttgttttcagatgaattcactgcaggatacatccaattcagagtgtttaataatgagagagcagccaatgccttgtgtgctggaattaaggtcaccggatgtaacaccgagcatgtgagtctgtgtagtgacaaaagacactcaccaataagactgaggttgccagtgtgtacctgtgaacattgagtatggtagactgtccttttagtgtgtgtacatgtatgagagtgtgacgcttccccttatcttgcttggactcggggatctgaacttctgtgtagatacagatatcctgtcttgttgaacaccatagtcaacattacaaactcctaatgcactgctgctgtttgcttacatactaggataaaacactcagtttcctggaatgagggtgacattgtattcatgaagtctggtacaagcctatagaggctgagattgttatagagtcaccaggtattgtcactctccacctggaatttagcttttagagtgaaacatatcatttccatccctttccagggcgtgtacagatgtcattgtgtcagggggttactaggagaattctggatatccggtagacctcatccaggccattatcctccctatcacaagaaatttctcttgttggaacttagtatatcaactaagtgacaaggaagatacttttgactccactgcagcaacttgatgtccctctgaacatgggatcattagattcacactactttgttttgttttttaataactttttaccaaaaaggtcaagaatggaggccttttatcgccagagtgaaagctgtaacaacttaacatgttctggctatgcttggtgctacgcatattcaatcccagcactgggatggtagagataagcagatctctgtgagtttgaggccagcctggactacatagtgagttccagattaaccaaggctacatagtgagaccctgttgcaaatactcagcatgttcttttgggatccagctcccataaagtaacagtctgagaaaagggtcctcagctcccagcaggtgatgcttaggatctcagtgtccattcattcctcggccataagcttgttcttcacttggccaagatgagacagcttttctgtcaaggaggaccttgagactgtgatgtggaatgatgaaatgggaagatcatgtgatgttgagggagtagaaaactgttttcaattttggtgtgtaggatggatgcaggatacaggaagtgttcgttttggaaattttaaaatggactagatcaggaaaaaattttacattacaccaatggtttttggacttgataagttatgaacattactgcaatgttttaacaggaaggtaacattgatgtgagcatgcttttttatttttcagagatgacattggtagcctaaaggtaacagattctaatgaaggaaagattaagcataagaaaataagtattgaaatggtttctatggtccaaatgagagactgaagcagtgagatggaaatttgggggagaaggtcgggaactgatgagtttcaaagatttcaagtttattaatagttgaatacagaaattggggatttgaagacatttgtaatgagcctttttctgtccaaccagccagctctcaaataatgacaggaagacttcttttttcctaataatttttttatttagaaacaatcttattttacatataatttcctcctttctctctccctcccatcctctcatgcccccttccaacccccaccacccactctccaaggatagtaaggccttccatgagggaccatcaaagtctatcacatcatttggtggagggcctaggccccctctgagtatctggactgaaatagtatctctccatagggaatgggctcccaaagtccatttgtgcactagggataaatactagttccactgttagaggtcccatagactgccacggcctcctaactagcacccacattaagagggcttggttccatccaatgctggttccccagctttacgactggggtccgtgagctctcactaggtcaggtcatctgtttctgtaggtttctccagcacagtcttgactgctttgctcaaccacccccacctccccacccccatccttctcatcaactggactcctggagctctgcccaggtgtggatctctgcatctgcttccatctggtactggatgagggctctatgatgacaactagggaagtcacagatctgattacaggggaatgccaatttagagaccctctccactattgctgggagtcttagttggggtcatccttgtggcttcctaggagcctctctggctccaggattcttcctaagccctgaatggccccttctatcaggatacacatcccatcattctcccactcagtcctgcccaaaatttcatcaccctgacccttcatgttcccacccccaccccctgcccttgacaccccctccattttacccaggacaccccatctacttccacttccaggaagattcatgcttccctcttagggtcctccttctaacacatttttttattagttcaaattaggaacaagcttgtttcacatgtcaatcccttctccctctccctctccctctccctctccctcccctcacctctcctaccccaccctgacctacccccccaccccatccaccctccactccccaggcagggtagggccctccacaggggctccgtaaagtccaccacatcatcctgggctggacctaggccctcccccatgtgtccagggcaagactgcatctcttcacgtgggatgggctctcaaaggctcttcttataccagggaaaaatactaatccaccaccagggggcccctggagtgcagaggcctcctcattgacatccatgttcaggggtctggatcagtcctgtgctggcctcccagacagcatctggggtccatgtgctctgtcttgttcaggccagctgtttctgtgggtttcaccagcctggtaccgaccccttcactcttcattcctccatctctgcaactaagttccagatttcagttcagtgtatatctgctaacacattttttaatctacgttcttccatatgctcattacctcatctccatgacacccatcctgcttcttccatctgtggttggtgattgcctttcttcttcccagagcattcactgtccagaagtcccacatgtgactcctgcctagctattggccatgtagcattttattgaaccaatcacactgacacatcttcacacagtgtaaaggagtatctcaacagacattttgaatgatttcatgcttttcatttgagtggatgaatatgaaatagtaagccaggatatctagatgctgaatatgtttgtgatcaaagatggatatatagttatatgattctggtttttaaggcatttacttgactctgtatgtgtgcacatgtgtattcaagtgattacaaaggtcaaaaggagatattggatccctgggaattggatttaagccctttgcttgggttctgagatctaatatggatgatgggatctgaacttatggttctctgatagagtagtaagatgtcttaaccttaggaccatctctccagcccccatactactagcttgtttgggtggaattttattttgtgttgtttcagatatacttatttaatttgatatgtatgagtgtttttgcctgtatatatgtgcatgtattgcttgagtgcttgatgcccttaaggaagaatagggtattctatgccctggaactggagttacaacagatgtgagccccatatgggttctgaaacccaaacctggtcttctgcaagagcatcaaatactcttaaccacagaattatctcgttagccccaatgtacatgctttgattacgatggacattgtaaatattggtggtcccagaggatttgtattgcctactaaccatagtcattctaccttgtgtaagtacagcctatgatgttcacggtgacaaaattgtcaatgaacttccccaagtaaatccccatttttaagttatgtgtggcggcaggtaactgggttgttactggtttgtttttggtttgtttgttgccatttcattcccatccctttccagagcttgtacagattttcattgtgtcaaggggttagtaggagaattctgagttcttgccatgacttccttcaatgatgaataatgatgagaaagtttaagccaaataaccctttcttcccaagttcctttggtcatttgtttcatcacagcaatagtaacagtgactaagacaaagggctttgttggtttgatggtttccaagattttaacacatagacatttggctctactccttttcaatccatagtggggcagaaatatcattcaggaaacacatatcagagcaatattgctcacttcgtagcagcaaggagccaagaaaaaccaggaaaggccagggcaaaatgccctacaaaacaagccactcacaccttcagtggcctatttcctcaaagcagatccccacccccatacccagcttcaccacctcccaatagtcagttcaaaattataattccatcagtgatgagccagttgatgaaggcagggtcctcatgtccaagcccttccccagagtcctgtttactctggggaccaggtcttcagtgcataacacctttggggagggcactacacatcaaatcaccagctgatctctcattgctacttccccctctttggtttttagcactgcatcggtggaggaggattcttcccagaaagtaaccctcggcagtgtggagacttctcttcatttgattggaatggatacggaactcacactgggtacagcaatagccggaagataactgaagctgctgtgcttctcttctaccgttgagaactttgtgctgtgggactcagacttcttctccaatctgtggactcacatgcacggagaaaatcttacctagttagtagaacaccaatgacacaggaaaagagaataaataatgttcattgcaggcttggtgtcttcatgaatcctttttgtacagggatggaagatttcaaaagagtttctgctgccctggttgcttctcttgggatatcaggcctagagatcctgatccagcaatactctttcaggtatccctcaaacatcccaagagatacaggatagagatgaggcatgctactctgctacttcctcattttatttgggttctttgcttgtttgattttttagatgggtctagtgtgttctgtgctggccataaactcccaatgtaacaaatgtcctgggtaaacaaaaacaatacatagagttctaattatttacctaagggtccagggagggaaggcagcccccaggtaaaggtgcttgccaacaaacctggtggccagagttcactttccagaatccacatggttgagagagtctacttctgagagacatcctctgacctctgcacatctgtcacagtaccagctcacaaacacataaactcacgcacacttgagggcaaaacatgaataaagaggtctaaaattttttcattgggaataataatattctatttcatatatgtaccagatttttttatcagaaagacaaatgaaatcacaaaacttgcaaaaataaataaataaagatttgcttggaatgtatactgttaaatatggtcatccaatctctctcatatgtggatcctataatgtatgcaatatatatgtaagtagctgtttgtgtggatacattacacttataaaaaacaaaaaaaagtctttttcaggcatactggatgcttttgtgtggaaacttgacacaagcttgagttattagagaggagggagcctcagttgagaacatgcctccatgagatccatctgtaagacatttcttaattagtgaccaatgggggagggcccagatcattatggtgtgttctataagaaagcagatgaaataagccatgtggagcaacccagtaagcagcaaccctccaatacctctgcatcagctcctgcctccaggatcctactctgtttgatttcaataggaagagcaatatggaagtgtaagccaaataaactctttcctccccaacttgctttttggtcctggtgtttggtggtagcagtagaaaactaactaggatatcagatgatgaggaaggatggaatgtaggcaaatgtcatatggcttgttgaaagggatatgcagtcaattgtttttctagtttcaactctgttagcatgtgtttgagtgtgtgtgtgtgtgtgtgtgtgtgtgtgtgtgtgtgtgtgtgtgtgttgaataagtcactaaaatgtaactgacagtgaaagtttaaaaccctaagcaaagccccagaaaggtcacctaaccatctagaagttcactgagaagtctagagttagggactgggcaagcaattgaaaggctaggctcacctggttgatcaatgttgtcacttgtgagttcattgcaataaatggtactttgtatttaaaaagaggtctgggatacagctcattgggagagtgcttgcctagtatccatgaagccctgggtttcattgtaagttcccacaaggaagataaagaagaggagaaaggagggaggagaggaagaggaggaaggagaagatttcaatctggcaaaagaatcacagagggaaaaaaagaaagaagaaaaatgtaatctagcaaaagaatacctttatatctttggttctagaacaagccaaactagatagtaggtgcattaaataaatgtattttgagtgcaaaccacagaattatatttataaattcacatttgcaaattttttatatttatgagctgggcagtggtggcacatgcctttaatcccagcactcaggaggcagaggcaggtggatctctgtgagtttgagaccagcctggtctacaagagctagttccaggacagcctccaaagccacagaaaaccctgtcttgaaaaaaaatatgataatggcaatttgtctacaatatgtgtatccctgccatgcctgactgctctctgtgggtcaggaaacatgcattgatttctctacatctgccttggaggtacagtacaacaacaaggccatccttgttgtaggataatctcttgttcactgtaaagatttgtcacttgcattggtttaataaaatgttgattggccagtagccaggcagggggtataggcaggacaaccacactaggagaattctaggaggaggaaaggcagagatgcagtcgccagccaggtgcagacaaagcaagattagaatgccttactgagaaaaggtaccaagccacatggctaaacataaataaaaattatgggttaatttaagttgtaagattttgttagcaataaatctgagcaatcagccaaacggtttataattaatataagcctctgtgtgtttttggggactgaatggctggaggaccaggcaggaccgaaacttctgtctacacaatctttagcaaaaattctccaaatttccctctaatagttacatttaaaatgaagatccagggatgtaactccactgtcacacataaaatcctgggtcctaattctagcaccaagtaaattggatatggttatatatacctcttggaaggtagaggcagaaggttcagaagtttgagggcagcatggcatccatgtttcaaaaaatcacattaaaatgcattttcttgggctggagagatagctcagaggttaagagcactgactgctcttccagaggtcctgagttgaattcccagcaaccacatggtggctcacaaccatctgttatgagacctggtgccctcttctggtgtgcagatatacatggaaacagaatattgtatacataataaataaataaattattttttaaaaaatgcattttcttggggctagagaaatggctcagcagttaagagcatggctggtcttgtaaaggacctagattcaattcctaacatgtacgtggcagctcccaatcacctataactctagttccattgtctttttacatgctcattgggtaaattttaaaaagcatttatattaaaaaatacattttatagaggaaggattaagtggtcatgagggagcagaaaggttgagtcaggggaagaatagaagaaagggtatgtgataggtagggttttagttggggatggtaggggaggacgggatggagaagggaactgggattgtcatgtaaaacaatcttgtttctagttcaaataaaaaaaatctgaaaagaaattagagaaataaaaaaatacattttattaaacactcaagaacacattatgatagtaattcactagaatgcaacaattgttactctaagccatgtatgcttcttagggatatatatagatatatgttatttcatttaatttttatgaaaaacacatgggaactttactgttattatgagtattttacaaataaggaaactgaaacttggatggatgaaaaacttatcagggttggggaaaagtcaaggagcaagcaaggtgccataaaaatgatggcataaaggcgctgctctgctccccaacctcccccctaaatctccactcacttctgcctgaacacccccagacaagagtggacctgcccagacaggaaggccactctgagtctggacacacctcactactatccacaattccaccctctgttctccggcgggcacccaagcctcagagcctgaaccctccgcctgccacctgagagagagagagaaaacacacctgcacccactggaagaaggaatgggaagaagacagagtaagaacacactcccaacagaaagaccaatatgacaccaccagaatccaggggctccacaccagcaagaactgaaaagcccaaggtagaggatgaagagatagaccttaaaaattgtcttaggaagatgatagagaccattaaagaggaaacaagaaaaattccttaaagaaatagaagaaaaaacaagcaaaaaattacattaaatggaggaaaagacaaaccaaaaaattcaagaaataaacaaatcccctaaggaatctaaagaaaaccaagaaaaaacaaccaaacaagtgaaggaaataattcaaacagttcacggtttgaaagtgcaattagaaacaataaagaaaacacattatgaggggatgctggaaatagaaaggctgggtaaatgatcaggaaccactgatataagcataaccaacagaatacaagacatagaaaagaaaagctcagttgttgaagactctctagaggatatacagtcatcaaccaaagaaaatctcaagtccaacaaatccctaacgcaaaatatccaggaaatatgggacaatgtgaaaagaccaaacctaagaataataggtattgaagaaggcaaagaaattcagctcaaaggtacagaaaacttattcaacaaaatcattgaagaaaacttccccaacctaaagaaggatatacctatgaaagtacaagaagcttacagaacaccaaatagattggaccacaaaaagaagtcccctcagcacatactaatcaaaacatcaaacttacaggaaaagaaaaactattaagaacagcaaaagaaaaaggccaagtaacatacaaaggcagacctatcagaattataccgacttctcaatggaaactttaaaagtcagaagataatggacagatgttctacagactctaagggaacatggatgccagcccagactactgtacccagcaaaactttcaatcactatagatggagaaaacaagatattccatgacaaaaccagatttaagcaataaatatccacaaatccaggcctacagaaattaatggaagaaaaactgcaatgtaataaagataactacgctcaaaaaactttaccaaacaccaaaaaagtggggaaatctacaaacaataacaccaccaacaacaaatccaaaacaaacaagaatcaacaatcaatggtcattaatatctctctcaatgtcaatggtcttaacttgcctataaaaagatacaggctaacagaatgtatacgaagacagaattcatccttctgctgcatgcaagaaacacatctcaacttcaaagacagacgttccctcagaataaagggttgggaaaagattttccaatcaaatggacccaagaaacaagctggtgtagcgatcctaatatctaacaaattagacttcaaactaaaatcaatcaaaagagatgaagaagggcatttcattctcatcacaggaaaagtccatcaagatgaagtctcaattctgaacatctatgccccaaatacaaaagcacccacatttgtaaaagaagcattactaaagctcaaatcacacataaaacctcacctacttatagtaaaagacttcaacaccccactctcaccactagacaggaccaccagacagaaacttaacaaagaaacaaaagaactaacagatgttattacccaaatgggtttaacagatatctatagaacattccatccaaacacaaaagaatataccttcttctcagcgccacatggaaccttctctaaaatagaccacatactcaggaaacctacacagatacaaaaaaattggaataaccccctgtatcttatcagaccaccatggtttaaagttaaaattcaacaacaacacaaatagcagaaaccctacaaactcatggaaattaaataatgagcaattgaaccattcttgggtcaaggaagaaataaaaagaaattaaagacttcctagaattcaatgagaatgaagacacaacatacccaaacatatgggaccctttgaaagcagtgctaagaggaaagtttatagcactgagtgcccacatgaagaaactggagaatagtcacactagagaattaacagtgcaactgaaagctctagaacaaaaggaaggaaactcaccagaggagtagatgccaggaaataatcaaactgagggctgaaatcagtaaagtagaaactaggaaaacactacaaagagtcaatgaaacaaagagttggttcttcgagaaaatcaacaagatagacaaacctttatccaagctaaccaaaaggcagagagacagcatgctaattaacaaaatcagaaacaaaaagggggatataacaacggacactgaggaaatccagagaatcttcaggtcatactttgaaaacctgtactccacaaaatttgaaaatctaaaggaaatgaacaattttctggatagatatcacttaccaaaattaaatcaagaacagataagcaagttaaacagacatataacccctaatgaaatagaagcagtcatcaaaaatctatcaaccaaaaaagcccaggcccagaggattcactgcagaattctaccagaaattcaaaggagagctaataccagtactcctcaaattgttccacacaataaaagcagaaggttcattaccaagctctttctatgaggctacaattaccttggtacccaagccacacaaagacaaaacgaaaaaagagaattacagaccagtatccctcatgaacatcaacacaaagatattcaacaaaatactggcaaatcgaatccaaaaacacatcagagaaatcatccaacatgatcaagttggctttataccagggatgcaaggatggttcaacatacaaaaatccatcaatgtaatccaccatataaacaaactgaaaaagaaaaaccacatgatcatctcactagatgctgaaaaagcctatgacaaaatccaacatcccttcatgataaaggtcttggagagatcaggaataacaggaacatgcctaaacatgataaaagcaatatacagcaaaccaacagccaacatcaaactaaatggagagaaactcaaggctattcctctaaaatcaggaacaaaacaaggctgtccactctctccatatatcttcaacattgtacttgaagtcctagctagagcaataaggcaacaaaagtagatcaagggaatacaaattggaaaggaataagtcaaactttcactatttgcagatgatatgatagtttataaaagtgacctggaaaaactctaccagggaactcctacagctaataaacaccttcagcaaagtggcaggatacaagattaactcaaaaaaatcagaaaccctactatatacagaaaataaatgtgctgagaaagaaatcagagaaacatcaccctttacaatagcaactaacaaaataaataccttggggtaacactaaccaaaaaacgagaaagacctatatagtaagaactttgagtctttaaagaaagaaattaaagaatataccagaaaatggaaagatctcccatgctctttgataggtaggatcaacatagtaaaaatggcaatcttgccaaaagaaacctacagattcaatacaattcccatcaaaatcccaacacaattcttcacagaccttgaaagaatagtactcaacttcacatggaaaaacaaaaaacccaggataaccaagttagagaaacttccagaggcatcatcatccctgacttcaagctctattatagagccatagtcctgaaaacagcttggtattggcacaaaaatagataggttgaccaatggaatcgaattgaaaaccctgatattaacccacacacctatgaacacctgatttttgacaaagaagttaaatttatataatgcaaaaaagaaagcatcttcaacaaatggtgctggcataactggatttggacatgtagaagattgcagattgatccatatctatcaccatgcactaaatttaaatccatatggatcaatgacctcaacataaattcagccacacttaacctcctaaaagagaaggtaggtggcacccttgaacaaattggtactggagaccactttatgaacataacaccagtagctcaaatattgagatcaacaattaataaatgggacctcctgaaactgagaaacttctgtaaatcaaaggacacagtcagcaagacaaaacggcagcccacagaatgggaaaagatattcaccaaccccacatctgacagagggctgatcaccaaaatatacaatgaactcaagaagctagccaccaaaacaccaagcaatgaaaaagatggagtgcagaactaaatagagaattctcaacagaggaatctaaaatggctgaaagacactggagaaagtactcagcatccttagccttcagggaaatgcaactcaaaaccactctgagataccatcttactcctgtcagaatgactaaaatcaataataccaataacaatctatgctggagaggatgtggagaatgaggaactctcctccattgctgatgggagtgcaaagttgtacaaccactttggaaatcagtatggcagtttctcaggaaaatgggaatcggtctacctcaagacccagcaatccctctcttgggcatatacccaaagaatgcacactcatacaataagagcatatgttcaacaatgttcatagcagcatcatttgtaatagccagaacctggaagcaacctagatgcccctcaactgaagaatggatagagaaaatgtggtacatttgcacaatggagtactactcagcggaaaagaacaatggaatcttgaaatttgcaggcaaaaggatggaactagaagaaaccattcttagtgaggtaacccaatcacaaaaagataaacatggtatgtactcactcatgtttgatttttagacatagagcaaaggatcactagcctgcattccacactgccaaaggagctaggaaacaaggaggaccctaagaaaagattgcatagtccctcgaagaaggggatggggacaagaacccctgaccaaattggagcctgggggcatggagaggaaagagagtcttcatccagttgctgttcgaagcagaaacagacaccaatagctaagcactgaaccacattactggaattcagttgtggagagggaggagggttgagcaaaggagccaagactggggtggagagacctgcagaaacagtggacctgacctgatgatagaatggagaccctagtcataaagctggggaaacagcattggaccaaactaaaccctctgaatgtggatgccagctaggaggccaagacagtctatggcttctctgacagcggagccagtctttatccctagagcacaaatggactttgggagcccattccctatggagggatactattgcagcccaaatacagcaaggaggatctaggccctcccccaaacaatatgacagactttgtaggtcctggtagaaggcctcactatccctggagaggagggggggtgggttggggtgggttgggtggggaacatgggaggaggggagggcgagggaatggggggatgtatatataaatatgagtaattaaaaataattaaaatggaaaaaataaataaatatctgtgggttttaagtattaccttgtaagaaaggcacacacaaaaaatcaaaacagatgtcaaatcttgtaagtttcctaatctatttcctttttttaatacacagatcgatggaattgccaaacatggtgatagtgctgggtgcaacatttaatatttgttttttagagactttgaatcccatgagttaacactgtccaaagaactttcctgcaataaacaaaagttgccctccagtggcatcctgccaggaaagggggagcctggcaaagtctgggcgattcccaccagactcttcacataaaaggacaagagcctagagtctctgcagacagagagaggctcatctccactcatctccactcagctgtccaagtatggaggggaaggcagttgcgtcaatggaacaaggaaagtggactctagctcaggtttgctttagggagcagagaggtgaggagtttagaggaaaggaaggagcctttcagtaggactggataggagctgaaagtgggatgagagaaaaaggaggtctggatagagagtgaccttcaatcttgctttccctagatgaccatgagcaaactcgacttcctgctgtttctcattgtggccaccaaaggctgcactgcaggtgaggcttgctacagaaccccagcttcctcaaatcacctctatatttaaagacagttagcaccagactgggttacttccatgacctgggtctctgtgggccagagaacatgcttttgctgtttgttgttgttttttatgacagggtttctctatgtacccttggctgtcctggaactggattgtagaccaggctggcctcaaactcagagatctgcatacaaatgacccctgagtgccgggattaaagaagtcagtcaccacagcttggccaatcatgccttttttaaaaaaattattattattattattattattattattattattattattattattaattaaatataattgcattattttcccattcattttcctccttccaacatttcccaattacaccccccaactcaaaacaaaagtaaaggcctctttgtgtttaattgtgggcatatatgtatgtatttatgtatattttcctggacgtgtaaatagaacctagtccatcccccagagatgatgccattgagttgtaggctgggtactgattgcctcttgaaggaattggccagtggcaatgagtttgttgaggaatggcctggtacagattctgtacctgtgcgtagctctaggggaccttctgtaagaactgtgtcctcttgatctccttttgtttcttattgctctagttagaacttcaagtacaatattgaagagatatggagagagtggcgaaccttgtctcattcctgatgttagtggaattgcactgagtttctctccatttagtgtgatgttggctgttggttgctggatattgcctttccctcccccaaatgatgtgacagacttttctgatcccccatggaaggcctccccaggcttgggcagtgggtagtgggtgggttggggtggaaggtggggggcatgggaagatgtgagggagagggaacgggggaatcaatatgtaaaatgattgtaaattattgaatttttaaaaagtaggttaaaaaaaaaaaaagaactgtgtcccgtcctagtcactccctatgattaagaccttggacttggagtttcaatgacaagtgaatggtctgaattgtgcccagacaatgttgtcttcaattctctctacaggaactcaacattatttcaaaatgagcacttccttttcactactgtattagtgtctttaaggaaaagggcaagaccttatatgccatcttaattgatctccacacgataatctttctcagcttgatatgagactttggggaactaaggttaaacacagcaaatacgatccaaaaataaatgacttgtgaacacagagctacttacacctgagcagctctgaccccaaagctctcactggtttcctcccttctaagtcctaagaggacattgtagggttgagtctagtttgcaaggctttttattccctggtctcttggtcaagcctctgcactgtcaacctcactacccatgcttcaggcacattaggctttctgcaactgggcttcacgtcattcatctttttcaggattttgaagtcaaaattctccacattcgaatctcttgtctctcttcctagttggaaatcttgttgattctcagagtgaggctttgggaagtcatgggatgagtttaggatgaatgacaagaggaggctgggtgtcccatgagagtgaaactctgcatcttctctagctcaagagaacctggataccaacagttgggccaatccggtgtgttcctctgttttcagaagctgcaaggaaatcaaacaggagatggctggggcacaaggtaagtgatgaagcgtttaaagaacacaccgtaatcctaacacttgaaagtccaaagcagaggaataaaagctccaagccagtttggggagatcatttctcaaaatacaaacaaaggacccagttaggaaatcaggatttttgtcctctggaacaggttttcttttttgatataaaaatgtaatagagccaggcagtggtggcacatgctttaatctcagcactcttgaggcagaggcagccagatttctgtgagatcaaggccagcctggtctacagaatgagtgccgggacacctatgattgttacacagagaaaccctgactcaaaaaacaaacaaaaaaaaaaaaagaaatgtgatagaatatacatggtggataaaaattgcacttaacctatttgaagagttttgagagtcaataacaactttcatgatggtatggatcaccactatccatctccagaaaatgttcattccttaaatgaaaagtctatagccacaaaatgaaaatttcctgtattccctgtgagctgctgtcctgtgtccaacttctgtgaacctgtcaattcttgttacctcatatgagcaatctgtcttatttcattagcatgcttcaagtctcatatgtgttgtagaacagtaaatttctgttgaaaatgtttattgtggtgatttattatttatgacatattaaagcttgcctgaggattcagaaagtaaagtcagccacaagcctttgaagccaggtacacaactttaatgtcaggactcaggattaagaggtagactgatctctgttagttcaaggctactctgtctacacaaaattgatctagtcctaaagataaacagctcacaaaaggtgatttcagcacctgggattacatgccattaatcccagcattagggaattatgtaagatctcagagcttgcatgcagtctcagaagtctctaactacttggcagtctgagtgaaactgaggagctatgaagtcgggagcagttttagaatcagccatttggagtgaactgagatagagataagaactagtggttggctgctttgcttttcctatcatcagcttgaagcttgaaccccaatatctctctctctggatcttttatttttcctgctacaatatattattatgattgtgaatggattacatgtctgtgtgtggaaatgtgtgcatgtgtgtgcacatacatgcagagtctagaagaggccatctactcctcaggagctggagtgacagacacttgtacactgccaagtgttagtgctgggaactaaactaactaaaatcctctgctagagcagtacttgctcttaaaattggtgccattcttttttatctattctatatgtgggaatgtacacaatatatattctgcatactagacagcacaccataatgcttattcctttttctgtagagaagtacttggcttgtaacaggacctctaatgaaaatgaatgtacatatctgagttcctgttcccagttctttgggtatctgcctagtggagctgttaagtcctttgataatactgtgtttaactttagaacaaaaacatcactgtcactttgggtaattctgtgttctgcctcagtcacagacgcttggctttctgaactcaggcacatccccaggaacacctgtgggagaacactcagtgtttgagtcattagccatgtttgtagttcctagagccattctgctgctggagcagagatggacaatgagcctgcacacaggaggactgtgaactggttctctctacagatggtctctatttcctccgcacgaagaatggtgtcatctaccagaccttctgtgacatgaccactgcaggtggtggctggaccctggtggccagtgtgcatgagaacaacatgtatgggaagtgcacagtgggcgatcgctggtccagtcagcaaggcaacagagcagacagcccagagggggatggcaactgggccaactacaacacctttgggtctgcagagggggccacaagtgatgactacaaggttggtacactctgtagccccctgggagagcatgaggatgtgagtgtagatcaagcgtgtcagggagaggaaaggaaagttgaccttcaacatagggatgaggaagtcaaaaatttacttatcttgaatctcaacatccgtccaagtaggcttttaggtaaggacatctgagcatggctggccatctgtccccctggagcccagagacatcagctgtgctgaggactgtgcatgtgggtctttccttagtgaaatctcctggtcttgtcaggctcagtgttggttgctttccagaaccctggctactacgacatccaggctgagaacctggggatctggcatgtgcccaacaatagccccctgcaaaattggaggaacagctccctgctgaggtaccgcaccttcaatggcttcctgaacgacatgggccataatctgtttggcctgtaccaggtacttgagactgctggctgaggctgcttttcaggggtgtggagagagaggcaggtgtttcaggttgggtgggtggtgtcccatgtttccctaattctaagtgtaatgagccaagataggcaaagtgtagggaaaaagaggagagaagagtatgcaggagggaagaaagaagagaacagaagagaagagagaagggggagggatggaaggagggatgtgtcagagagacacagacaaatgaaatgatcctttcttatctgactggtttggcaaccatctcagttactgcacaaatgctgtgtttctctgagcagggcagtgttcctgagattgccaatgctgccatacttacccagtgacttcttttgttccttgtagagatacccagtgaaatacggaggagggaactgtaggactgacaatggcccagcattacctgtggtctatgacttcggtgatgctcagaagacagcctcttattactccccttatggccagagtgagtctttaatactcctgtgctccctctgcaggacatgtgataaattcagttgtgataagtaacagtcattcaccatccgccaagcctgcttctcttctctgaatgtttgtgctttgtttcacatcatttacatgataacacttgagctctcaactatcactaacccattttacagcttaggagactggagcactgaaggtccaggaacttgtctgagagcccagggcatcagcaggacaggcagcatttgcactggggatacttggttctggaatctactctttccaaccccactgtcattcagacaaaccaggtccctgtgcacagagctgagcaacagaaaaacatggagttttagttcatacgtgagggacgactttacattgtttaacataaatgcaagtgtggtaatactctttataaatgctgagcttatgcagtgtagttcaaagctcttcttatttatgctggggatgtaaggctttaaaagaaaagttggcaagatgaatatgaacaggaccagaaccatgcacttggtaactgctgtggcaagccctaggagatactcagtagagaccttcctgtatcacaaatttctctattcaagctcaggcaattggggaccttttttcaaggactggctcttggagtctgtggatgggaataggtgaggtttccccagtgggtctgatattttagactgcttatcctgaaactggcaccaccaaacaattgtcttgcaacaatttctagcattttccttgaatgctgttttctgtctcttctttttagaggaattcactgcaggatacatccagttcagagtgtttaataatgagagagcggccaatgccttgtgtgcagggatgaaggtcactggatgtaacacggagcatgtgagtctgtgtggtgatgaaagacgctcatgaataagactgaggttgccagtgtgaatctgtgaacattgagtatgggagactgtccttttagtgtgtgtaggtgtataagagtgctacctttccctataccttgcttggtctcagggatcagaacttctgtctagatacagatatcctgtcttattgaaaactatactcaacattacaaacttgtaatgcactgttgctgtttgcttagatttaaggataaaacactcagttacctggaatgagggtgacattgtattcatgaagtctgctacaagcctttggaggctgagattgagtcaccaggtactgtcactctccacctggaatttagcttttagagtgaaacatatcattcccatccctttccagagcttgtactgatttgcattgtgtcaaggggttagtaggagaattctgagttcttgccatgacttccttcaatgatgaataatgatgagaaagtttaagccaaataaccctttcttcccaagttcctttggtcatttgtttcatcacagcaatagtaacagtgactaagacaaagggctttgttggtttgatggtttccaagattttaacacatagacatttggctctactccttttcaatccatagtgggacagaaatatcattcaggaaacacatatcagagcaatattgctcacttcatagcagcaaggagccaagaaaaaccaggaaaggccagggcaaaatgcccttcaaaacaagccgctcacaccttcagtgatctatttcctcaaaacagatccccacaaccagacccagcttcaccacctcccaatagtcagttcaaaattataattccatcagtgatgagccagttgatgaaggcagggtcctcatattcaagcccttccccagagtcctgcctctgaatgttacgtactctggggaccaggtcttcagtgcataacatctttgggcagggcacttcatactcaaaccatatcacccactgacctctcattgctacttccccctctttggtttttagcactgcatcggtggaggaggattcttccctgaaagttaccccacacagtgtggagacttctcttcatttgatgggagtggatacggaactcacagtgggtacagcagtagccgggagataactgaagctgctgtgcttctcttctaccgttgagaactttgtgccgtgggacccagacttctccaatctgtggactcacatgcacggagaaaatcttacctagttactagaacaccaatgacacaggaaaagagaataaataatgttcattgcaggcttggtgtcttcatgaatcctttttgtacagggatggaagatttcaaaagagtttctgctgccctggttgcttctcttgggatatcaggcctagagatcctgatacagcaatactctttcaggtagccctcaaacatcctaagagatataggatagagatgaggcatgctactctgctacttcctcattttatttgggttctttgcttgtttggttttttagatgggtctagtgtattctgtgctggccataaactcccaatgtaacaaatgtcctgggtaaacaaaaataatacatagggtttaattgaggtggcccccaggaaaaggtgcttgccaacaaacctggtggccagagttcactttccagaatccacatggttgagagagtctacttctgagagacatcctctgacctctgcacgtctgtcacggtcccagcactcaaacacataaactcacgcacacatgagggcacaacatgaataaagaggtctaaaaatttttctttggggataaataatattctacttcatatatgtgccagattttttatcagaagaaaatgaaatcacaaaatttgtaacatatatatagacatatataaacatatatatatatatatatatatatatatatatatataggcttagaatgtatactgtcaaatatgatcatccagtctctcccatatgtggatcctagcctataatgtatacaaggatatatgttcatagctgttagtgtggatatattacatttattataacccccaaaacagtcttttcaggtgtacttgatggttttgtgtatcaatttgacacaagctaaagtcatcaaagaggaaggagcctccgttgagaaaatgcctccatgagatccagctgtaagacatttcttaattagtgaccaatgtgggagggtctggctcattatggtggtcctgggttctataagaaagcaaactgagcaagccatgtggagcaatccagtaacctgcaaccctccaatacctctgcatcagctcctgttccaggatgctgccctgtttgagttcctgtcctgacttccctcaatatcagcagcaacatagaagtgtaagccaaataaccctttgctccccaacttgctttttggtcctggtgtttggtggtagcagtagaaacctaactaggatatcagatgatgaggaaggatggaatgtaggcaaatgccaaatgacttgtggaaacggatatgcagtcaactgtttttctagtttcaactctgttagcctgtgtttgagtgtgtgtgtgtgtgtgtgtgtgtgtgtgtgtgtgtgtgtgtgtgtgtgtgtgtgtgttgaataagtcactaaaatgtaactgacagtgaaagtttaaaaccctaagcaaagcctcagaaaggccacctaaccatctaggagttcactgagaagtctagagttagggactgggcaagcaattgaaaggctaggctcacctggttgagcaatgttgtcacttgtgagttcattgcaataaatgatactttgtatttaaaaagaggtctgggatacagctcattgggagagtgcttgcctagtatccatgaagccctgggtttcattgtaagttcccacaaggaagataaagaagaggagaaaggagggaggagaggaagaggaagaagaagatttcaatctagtgaaagaatgaaaaaaggaagaagaaaaatgtaatctagcaaaagaatatctttattctttgtttctagaacaagccaaactaggtacattaaattaatgtactttgggtgcaaaccacagaattatatttataaattcacatttgcaattttttatatttattatctgggcagtggtggcacatgcctttaatcccagcactcaggaggcagaggcaggttgatctctgtgagtttgagaccagcctggtctacaagagctaattccaggacagcctccaaagccacaaagaaaccctgtctcgaaaaaaaaaatctgataatggtaatttgtctacaatatgtgtatctctgccatgcctgactgctgtactctctcacctactgccctctgtgggtcaggaaacatgcattaatttctctacatctgccttggaggtacagtacaacaacaagaccatcttcgttgtgcgataatgcccttgttcactgtaaagatttgtcacttgcattggtttaataaaatgctgattggccagtagccaggcagggaatataggcagggcgaccacactaggagaattctgggaagagaaaagacagagatgcaaacatagcaagatgagaatgccttactgagaaaaggtaccaagccaggtgtctaaacatagataagaattatgggttaatttaagtggtaagattttattagcaataagtctgagcaataggccaaacagtttataattaatataagcctctgtgtttttctttgggattgaatggctgcaggcaagacagaaacttctatctacacaatctttagcaaaaattccccaaattttcctttaatgattacaattaaaatgaagatccagggatgtaactccattaccacacataaaatcctgggtcttattcctagcaccaagtaaattggatatggtagtatatacctcttgaaaggtagaggcagagggtccagaagtctgagggcagcatggcatacatgtcctaaaaattcacattaaaatgtattttcttggggatagagagatggctcagcagttaagagcactggctgctcttgccaaggacctaggttcaattccaaatacatacatggcagctcacaatcacctataactctagttcctggggatccagtaccttcttacaccatcattgggtaaatttaaaaaagcatctatatttaaagatacattttattaaacactcaagaacacaatataatagtgactcactagcatgcaacaagttgttactctaagccatgtattcttcttagggatatatatatatatatataatttcatttaatttttatgataaacacatgggaactttactgttattatcagtattttacaaataaggaaagtgaaacttggatagatgaaaagcttatcaagggttggggaaagtcaaggagcaagcaagatgccatgaaaatgatggcatatgccagttgtctctctgtggtaggagaggacttaaaccaaatcacctcctcggtgaggtcctcctggcagacgtctctacattagaggccccctctgtgcttccctggctccatgagactctttttcctagaacttatcacttttgccctggaacagcctgcagttagtacatggctcatctgtttgctttttttccacagctcaatagtccttattgactagttctggactaagggctggagagcatgtgaaagacaaaagtgttctgtagctggtctgcatactccagccaacagtgtctagcctgagggaactgggtcacacacaggggactgccaacagatacaactcatccaggatttcctatccctaattagaagaaaagcatgtgagaataatgaggagccaaggatatctatatagtttttaattttttttttgtgtgtgtgtgtgtgtgtgtgtttcacaagccattatgccattgaggtcagaggacaattttccagctcagttttctctttctaccacattgatcctgggaatcaaactcaagtcattgagctcactggcaagcatcccaaccagatgagtcatcttgctgaccccacctctttagatgaagaatgaggacaagaggtaaaagaaaatcaggaaagaacagctggcaaaaagccaggtttttaaggaaagagaaggaaatggaaaaaatgggaaagagtagagagacctcaagcaatttctcattcaggacgtgtgaaatctagttcaaagaagataatcttcacacacacacacacacacacacacacacacacacacacacacacacaccatgctttttaatattgttaatatgttttgcttacatgtatgcatgcaccatgtgtatgcagtgacaaggagaggccagaagagggcatcagatactctggaacgaaagttacagacagttgtgagcaatgagggtgctgagaaccaaacctatgtcttctgcaagagcaatttaaggtcaatttaggacacagaagactctgtcacaaaaaaacaaggaggaggaaggtgtgaggagaggagtaagaggagtagaatgggagatgaatagagaaatgtgtgtgcagtgacaagactattgcttttttcagaggacccaggtgcaggtaccagcactcacatcaggcagctcacaacttcctacaactccagttctagggaatgcagcgccctcgtctggactcagttggcacctgcacataatgtggtgcacattaccacatggaaacacatacatgcacaattcttttacacataatttatggtaaaacgaagaaaaacataatatgatcatcttttttcagcatttttttcttgaaagttttttacattcttttttattttagaaataatcttattttacataataatcccctgattccctcaccctcccatcctcccatcccccccttgacctccccacccagaacccaccccaaacccactccccaaggatagtgaggccctccaccagggactagggtctctgtgctctcactaggtcaggtcagctgcttctgcggggtttctccagtatggtcttgtctcctttgctcatccctcctccttctccacaactggattccaggatcatcttaatagatatagaaatggtggtgtgtacgattctacattcattcacaacaaaacatccattcacatccaacgactgggtaattaactcatttggtaaaggacttattgggtgtattagccaaggttctctaaaggaacaaaactgattgtgtgtgtgtgtgtgtgtgtgtgtgtgtgtgtgtgtgtgtgtgttacagggggatttattagagtagcttacaggctgtggtcctagtactccagcaatgtactcaagtctccacaggaattccaaggacccagtgattgttgggtgcatgagacttaatgtctcaacattcccagtctggtactggaatcccagggaaagcctagagagctgtcagtctttgtctatgtgggaatctcaaagcagtatgttataacaccagcaaaggaaaaggaatgcctcaggaacaggacatgcaaactcccaagcaagagtaagacaagcagacaaaaagcaaaagctttcttcttccatatccttctatgtgggctgcaaccagaggtgggctctatgtttagggtgcaaatgatccaaccaagaaaatccaccacaaggaaatccagctgcttcagttttagctgattccagatgtggtcaagttgacagaaaggttagccattacattgctcaagtgtaagtttgtgtccccagcacacgcataaaaattggtacagcagccggacagtggtggcacacgcctttaatccagcagctggaaggcagaagcaggcatatttctttgagttcagcctggtttacataagtagtttcaggacatgcttcaaagctatagataaaccccatctcaaaaggaaggaaggaaggaaggaaagaaggaaggacggaaaatgggtacagcattgtgtacctgagtcacagccctgaagaagcggagatgggtggatcatgggccttgttggacagccagtctagctacatgggcaagctccgggttcaggaagactccctgtctccaaaattaagatggacacagccaataagatggctcattgggtgcagacattcaccaccaggcctgaaaacctgagttaatgcccaccccacgtggtggaaggagaaaactgactttctcaagttgtcctctaacttccatacatgtgcacacacacacacacactcacacacacacacacactcacacacacacacacacactcacacacacacacactcacacacacactcacacacacacatagacacacacacacatagacacacacacacacatagacacacacacacatagacacacacacacatagacacacacacacatagacacacacacactcacacacacacactcacacacacacacacactcacacactcacacacacacacacatagacacacacacacatagacacacacactcacacacacacacactcacacacacacacacactcacacacacacacacactcacacacacacacacacacacacaatgaaatacttatttttttctttaaataaggccaggatcactggcttacacctttaatcacagtactcatgagacagaagcagatgaatctctgagttcagggccagcctggtctacacaagtttcaggacaaccagggctacaaagagaaactgtctcaaaaagaaattagtttttttgtaatttaggtaaagtatgataaagcacacttttttaataagaaacttactaaattttacttattcttttttaaaatatttttatttaaattagaaataatcttattttacttatcaatcccagatccctctacttcccatcctcccatcccccacaccaacccccatcccatcactgttctgctctatagaaagggtgaggccttccatgggggatcatcaaagtctgtcacatcatttggggcagggcctaggaccttccccccccccccccgtgtatctaggctgagagagtatccctccatgggggaatgggctcccaaagtccattcgtgcactagggataaatacaggattcaatgacagaggccccatagactgcccaggcctcccaactgtcacccacattcagagggcctgattcaggcctatgttatttccccagctatcagactggggtctgtgagctcccacttgttcatgtcagctctttctgtgggtttccccagcatggtcttgacccctttgctcatcactcttccctctctacaactccattccaggagttcgactcagtgcttagctgtgaatctctgcttctgcttccatccgctactggacaaaagctctaagatgacatttaaggaagtcatcaacctcattataggagaatagcatttatgaagcacactttgaagcaagcatgtttttcaaggatgggaatgaaacccaaggctctagttttttcatattcttgtcatcatgttttcatttcatcattacacacatcagagactcaaactttgccagttcagtctgtagcacaagaagaaaggtcaactggggtaacttctgtccgctgactgtgctctcaccaccactacccagatcatcattgccaacagtaggtgtaacacgctcactggttctacagactcactactaacatctctgattctattctgctgcataagaagctgatctaaatgacacgtgagtcccaaagagagcaggggaaaactggagagatcatctgccatagaacccactgaccagcagcaattgtttgctttgctttcaattctgtcagtgattccgccctaatccaatcctgagagtaagggtgagggaaagcatgggaatgacccagcagatgttaaacacagcagaatccagctgtaacatggaaaataaatgacccagagactgatattgaggttcaagcttcaagctgaagatcaagaaaagcaaaccatctgggcactagctctcactctacctcagactgaaaggtgaccctgactccaccaaacctcagactgctgcctctcctcagcatggctggagaatcctgagacttcaatgtcttcttatcctcaatgtggctggagaatgaatccctgattctgactactgaagaccctgttcctgcctttatactcctcgagtgctgggattaaaggtgtgtgatcccaagtgccgagatcatctttgtgtggatcacgcagatgtgtgtctgtgtctgtatctgtgtgtatcagtgtgtgtatctgtgtctgtgtgtgtctgtgtcagtgtatctgtgtgattgactggatcaatctcgtgtagatctgggtggccttacacttacagagaaatacctcttaatcctgagtcctaggattaaaggtatatgccaccaccacctagctctatggctgctgggactaaaattgtgtatcaccactgcctgatctctatatcttggggctaacattgctttctgaatcctcaggcaaactttcataaatcataaataatatatcacctcagccagccatgccctataactgctgctcaaaatgtagcctagtagacaaaaatgattcttatttaaactcactaagtcatacaaggaggtaactgacaggatcgataagacatgggctctaaaccccagatgatacagggtgacaacaatattttaatgagatcacaagaaccatcatggtagtgatggcagtgatgcctgtctatgtgtgtctgtgtatatctgtgtgtctgtgtgtatctgtgtgtgtctgtgtatctgtgtgtgtgtctgtgtatctgtgtctgtctatgtgtctgtatgtgtgttgagtggtttgtttcagtcagggtctctctcctatatctcaggttgccattcagctcaccaggtagtcagagatgaccttgactactttatctttgtgtccccacctcccaagttccaggattaaggatatgggccatcattcttagctaaggcttgtgttttataagaaaactttttggcggcagtgtggtgttaggagatattcaattccactgtaaaccttgggtttgcatttgcattaatgaaataaaattaatctgtgtcaggaggctgagttagcaactaattgacagaaagtaatcatagagcatcagagggcatctggaagagacaaagacgtgcacaggaagtagtagggaggggttttgagagactggctttttcttttttggcagaccgaaaaggatggaataaagtggggcacaaataacgcgtacctcaaaggagtcagaccaagtttgacgaacagatgttttaatagaaaagtactcacacaatgagtcagtcctctaaaccaggcaaaccatggaacagagagagccgcctgtgtgcgaccctcatatgtaaggccttgctacgtcactgaccacaccctagtctgcgtggtctgtgtcacctgtgccaggccccaagagggggtggctaacatttcccctacagttccccttttagtctaaaagaaaattaaaacttaacagtgtaaattatcattaacaatcataagggtaaattaccgaggttataataatctactaatgtcacatcttaactataactattccaactaaaccttaaagtcatctgaaagagatgtccaagcttgaacacctccttccaaacccaaccttaaacactaggaaactagccctaactaggtgtcaacagtgaggaaagggggcgtagtattctccatgctacttcctgctgaactggggaccatgacaacctcgtggggtcccatgggaagaaatgttagtataatgaaagtcctgagtgggttatatccagtctgtgtttggtgggagatgcttgattgaaggtccaggttgaagttcttgtgttgattgaagtcagtacccgaagctctggctggagtgtcagttgaaacaaagtaagttggctccagtggactcgaataggtatggtccattttctttccgaagtgtccagggattgctgtcaggcaggtgggactcaaacataaatgttagcagagagatgtttgcttttatatgtatgcatactgggaaaggcaaccatgggaaaataagaattatgaaagggtgtacaccttgagagaaaaaaaccaagacaaatgacagtccctaatctttcctctattctgtattacatcaatcggcttcttgatatagtacagaaactcaagtttatttttttaatgccttaacctttttttatttttcaggaaattgaaaagattttcagtaacatttcagatatacatgaattgactgtgaaacttttaggtttaattgaagacacagtagaaatgataggtgaaagttgtcctcatccattagctggtagcactcaagtttattttaacaatgtgcttggattcagaggaggaaagcaaaatccaactctaaagccagcattgttttaattgaatagggactaggaaataaagagagagagagttctctaagagacagctataaagttaaccatatagcacattccttttgtttgaaggttatagctgccttcttttattaagtatctacctattcagtgtcctttgacttctggaaaagagttgtcctgtgaagataaaggcaaaacacttccctttcctttgggaggtttctatacagtttatgagacataccttggtatgttacctatcattcttcctcatcaagaggtttttcatttttgactcaaatcttgattaactttggtggtccaaatttttccttctcctgtggaaacaaagtgaaaccccttccccaacgtaacacatgtcctgattccatacatatagtattctgtttgcatatacatctgcaggccacaagggggcacaagacctcattatagaaggttgtgagccaccacgtagttgctgggaattgaacttgggacctctggaaaagcagccagtgctcttaaactctgagccatttctccagccctggaaacaggattcttaatacagtgattatgtgaaaactaataattagggcagctcctaattcaacagagctggtctattttcaagatgaggaagtttgaacccagagggagacatcaggagcacatgcacacagacagaccatggagagaacccggtgaggaggcggctgtctacagtcagcaaagaagccttggaaggagagtctgctgatgcactcatcttggattcctgtccccagaactaggggaaagaagctgacagtgttcagaccacctaatcttccagtccccaaaagagcactgttgcactacaggacccatctgtggccaacgaggacagtcatgaagaaggtcctaggaaatgcttcctccctcctgaaaaagaactgtaggaatgaagagccattctcccttgtcttgtggtaatacatggagcagcagtagctactctgagctcactcataggtgaagcaagatggagacagaaagagcctacagccttaaagacataaagaaactggaatgtcagctaagcctggagcttctctctttctagagttcttatatcatgaagtgatatatttacattttatttcatttttaactctctctctctctctctctctctctctctctctctctctgtgtgtgtgtgtgtgtgtgtgtgtgtgtgtgtgtgtatacgcaagagtgagggtatgcatggaggtcactggtattgtagccacctgacaagggggctgggaattgaactcaggccctctggaggagtgacatgcactcttaactgctgagccatctctccagtcctgatagatttacatttttattgttattgaaaatagatgcttctctcatataatacatcctgactacagttttctctacctccactcctcccagaaccctgcacctctaccctctcccatgcccacccccaccctatttcctctacagaaaagagcaggtctccacagatgacagccaaacaggacaaaacaagatacaataagacaagggaaaacaaccctcatatcgagtctggacaaggaagcccaataggagcaaaacagtcccaagaacaggcaaaaagtcagaaacacccctactcctacaggtaggagtcccacaaaaacaccaagcaaacagccataacatacacactgcagaaccaagcaggccccacggttgcacatttcagaatcaggccacatgaagaacagatatagcaggcaattggggctagaacctggtggttaggaaggagacatcctccaaatagtctagagtttctcagagtcttaggtctaaaaagttagaggctgtcctatgacttatgtaatagtaaggaagagatgtataatgacatcaaaactgtcaaataaataaatacatacataaaagcagtcctcccggggatatctacccaacacagcataacaagaagggagagcaggagaatctgggggagaggagtcagggactgggggctggaaggagggaaggactggagggtgcaattgggatatattgtatgagggagaaagaaagaaagaaagagagaaagaaagaaaggaaggaaggaaggaaggaaggaagaaagaaggaaagaaagaaaacaatagtagtgggggccatgtaggaggagcggcgggaagcacttaagtttcaggagttcggttcaccacaatgcaaggcactgatgggtgaatcgtggataggcaaggcctttacatgtttgctgctgtcatttatctctggcaccaggcaatgctgtgagtgggtgtgggggatccccactacatttaatgtagagtgattatctcatggaaatcgcccgttctactgggaatttttacctgtggattattatgaagatgatttcctcttaagcttactatttagttgaagtaatgactttatacaataatagtgttagtttaaatagaatttttatgcttgtgatttttttaacaaatatagcaagggattttgttagagattagtttagtgggaaattttaatatcagtaaaggttagatagagagctgaccccacccttgttaaaccagggctgcaaagggtagaaaataggaacaaggaagtgtcacgaggctaggacttaacagttttgcaagaggagttgtatagactgttggtttacattaatgattaggaaaacaattgtgtcccaggagttagctcaagtgggttttcatattgggggatgtgttcagaggttctggtgtgcatcgtagctaaaacaaagttataaagaattgacttcatggaactagaaaacaaaaaattgaatggttagttaagataactgtacaggactctaaattatgaaacgcgaaacaagtgaccagtttttctggcaattataagagctgctgcctgtgtaaattgctatggatgaaaggctcctgacctgtgggaagtcttacagataagtgtttaactaagtgtgggtttctcaggaaatgcataaagatgtggttaagaaatgtcgtgtggctgactcgttccacaaaaaatatggttttatgatgattatgtagtaactgtgtaacttttagtcatggaaaaatcctctttgtaatgaacttggtgtggggaatattaaaaaggtgtttaaaaataaagagaagatagaaagatgattggtagaccctaaacatatgtgtgtgtgtgtgtgtgtgtgtgtctgtgtgtgtgtgtgtgtctgtgtgtgtgtgtgtgtgtgtgtgtgtgtgtgtgtatttccctttttgatggccccagaattaatttttacaccctcagatagaatggtcaattgagtgattagtccaccaactccatggctccccttcaattcctgagctgctgctgaaggctgctccttacaccagccatctgggatcactacaataaagtagtacagacagggtggcttctaattcattatgtatacaaacatggccttgaacttgttcactgaaaaatgtatagattttctttggatgtgaatagttcttttgtttttgtttttctttttcatattatcttatgtatcagaggctgtcttccaatgtggctaagtgggtggaggataaccctgaccttctgaccctcctacttccacttcccaaaggtaggaattccaggaatgtcccaccatatctagttcacacaatgctaaggattgaacatatagctcatatgttaaaggtatacattccaccagttgagctgcatgcctctgttttattctattctatcaacctgcattatgttgtgtaaatcagtcctttgaacacacaaaaatataaactataaacttaatcaaaaggtgaatcccagagggttgcagtataatcagttctataataaagctttgtatgaggatgcttcattgctgaggaaaagacaatcattccattagaccccaagtagcatctgagacctggagaagacaaaggtggacatggaggaagctggaagcatcttcagggggatttctagtgatttaatcccaaatgcagtctactgtaaaatttcactacttagtagtaactatgagaaaatcaaggacaaaatagtgagggttgtgtggaactcaatttatgcagactaaaggtttatatttattcttaaatgattatattactattgtgaggttaaacttttcttttttcagacacatctgatgccaggggtctgctcaccggatccaaactcagcagcaggatccaacacacctggacactgccgagaccccagtaacagtaccacctccatccatgagaagagcacagacatcagagtattggatctgtttgcatctaccagaagggaaccttggtcccatacccaccaggagaggaagagcctcctgctacccctaccagaagaaaggatgagaagaggacaatgtaaaagcacattcaacaacagaaaacccaatatgacaacactggagactaggaaccatacaccagcaagaacatcactctctctgcttcctctctactccgtctctcacctactcgctctccctgcctctctatggcgactggccatggcggtcagccattacccctgttcctcttctctcttagtctccctactctgcagggcctgtataataaactagtcaacatgtctcatcttaaagctttctcttttccttttttttaaataaaaaaaaaaaaaacataacattggcgcccgacttggtttaggctctctccgtaaactctctcgctgcttgctggtgggataggctttctctctaacttctgccaggggcacaggaaatttcggagatcctaaaatctgaactcataacccttttccatctcagcttttcctggcactccctcctacctgcagcagcctgagatgccggaactctgtacacttcaactcgctgcctttccaactacagatctctggaactcactcatctgcctattcgctgcaatccggtaagatgcccataacttttcccatggggcagaccaaacactgcattttggagttcactctgggtacattttttcggtttcgaactgctgatcctctttcgggctttctgctgggtgctctcagacagagcaatctgtgccatttttggccttgcccacgggaaatacattttaggggatctttcggttactgccagcgagtaggtaaatgagcggagttctgcctcccagtgggaactttctttcacctgggaatgtccctcattgttctgtttgttctttctctgaccatgtttcttggttggcaatgtctgcttgagacgctctgagagttttgtttgtttgtttcttactgcctcactcatggagaaaaacttccagcaattgagaatgtgcttacaggggccgccatctcggccatgtgcactaacctgggggccaacatcttggtcatgtgccatcctaaccacgtgacctagcttaggcctgcccactcagttcagtgacttgcacaggcaaccatggccaccagacattttgctttttatttcacttgttgggtgcatttcctgagtgtcaggcatgggatcccactccaggagcttttttcagttcggaccactgggtcctttttcagtttcgggacagctgtgtccccttcagggccaggcccctggcaactcccacaggcagacgtgcatccggagaggagctttttgctggttttccacttgcctcacccatgagaaatgcatagaggaacctttctggttgcagccaacaagcagataaacagacaaaagcggcttatggttgccgccatcttggtcatgtgacctacctgtaggcacgcccactccagaggcctatgccagcaaaactgtctgccagatttttgatttctgccagatctttttgctttttattttattataatttttgtctgtgatttcttctttcactggctctgttgctcatggcttccttacagaatactgtgtctttccaggaccctctatttaagtctactctgtccctttaaatctcctgtctgtttgctatcagaaattgcattctagttcccctttttagtgttatctagtcctgcttgtctctgtacctgtaatttaactttatacctatttagctctatatgtaacttaaattaaactgtgctaagtctcatatttctaaattgctatgtatcttgaaatgatggtaaacatttaaagtcataaatgtctaacttaactatacttaaaatataagctaagtctatacaacttaaatttaactcatgtatctttaaatgatgatcaaaatttaaaatcacaaaggtctatttcaaattaacaaaatatttataccactcaattcaccctataagctgtttacaaagctacagcttttattacaaaaagggatttttctctaactaaagacaaacttaactgctcagatactaaacagacagcccttaaatgctcagagatctagagaatatggcatttaaaatgttttgttaaaaagctttttataacagagagataggccagctgctggctccaccccattttctccaagaagactgatgggcactgaagaaacttcatctcgagtcaatgacaacgctggtcactgagcaaccctgcccttcacttcaactgccacaaggtactccagactgtggacaagatgacagtggaatcgacttttcccacgttgttttggccaacagtaggcaagtcttcctatagtctgtatcctcaggtcacatgttatcagcaagaaggcagatgtcctgcagcccgctactatggatagaggaccttggggatggctgtccatgcagcctgctggcaagtctctgttattctttaatcattgattcaggtaaaatcttatccttctcaagaactctgatgcttttgacgactggtagtcttgccagcttaaacaaaaacagattccaggaacaggtattttagggtttatctatgtgaagataggaaagtataagatgtatgaaggtctgagaatgtagttacaaaggtctgaggatggaaagatctaacacggtggataaatacaagttatgaaggtctgagaatggaaggtctaagatggtaatattaggtgtatgaattaaagttataaaggtctgaggataaaaaaggcttaagtgataaagtgagttgagacattaaaaagaatgaaatatgttcctgatttctctatttctcatgctactgttcatagtcagttctacaataccactgtacgatcataactactaggtcaagattaagatgcttttcattgttctaaaaaaaatctgtcaattttaaaatgttaatgctttcagccaagttgcttctaacatgaatatacttctaacgtgtctaatacttatgtttccacaaactctaaggattattgtaagttccagggagctgaattggagccaaacaaacaggtctaaaaggcgtcagggagttccgtacagcctggactgcaatgaaacaaccagttaccccaggacgtggcagcaccccaaccttctcaggtcctccaaagatgatcaatgccccccacgtcagcaggaagcagtcttgaaaattcgacgcccttattccttaacctgccatgtctaacaccccaccttttttaataataagtagaggtgggaatgaaggttcaagctttgacactgatcggctctacctccttaagagacagacccctccccctgacatagtcggggcatgcacaggaaaacttgctaagtcatcgacacatcacctaccatgcattaccgcctgctgaggactctgggcttgtgtggaacctcagtgcccatgtgcagtcttcccttcccatccaaatacaaaactccagctttcctgcttcactctctctctgcttcctctctactctgtctctcacctactcgatctccctgcctctctatggcaacctgctatggtggtcagccattcccctgttcctcttctctcttagtctccctactctgcagggcccgtataagaaactagtcaacatgtctcatcttaaaaaaaataaaagaactgaacatcacaatgcagatgaagcagaagagaataaccttaaaaacatcttcatgaaaatgatagaggacctcaaagaggacatgagaaaatcccttaaagaaatggaagaaaaaacaaaccaaaaaatacaagatatcaacaaatctctcaaggaaacagttcaagacctaaaacctgaaatacagacaataaagaaagcacaatcggagcgaatgatggaaatagaaaagctgggtaaatgatcaggaactacagatgtaagcataaccaacagaatacaagagatggaagagagaatctcaggagttgaagacacactagcagaaatagattcatcgaccaaagaaaatctcaagtccaacaaattcctatcacaaaatatccaggaaatatgggataacgtgaaaagaccaaacctaagaataataggcatagaagaaggtaaagaaatccaactcaaagatgcagaaaacatattcaacaaaatcatagaagaaaactttcccaacctaaagaaagatatgccaatgaaaatacaagaagcctacaaaacaccaaatagactgaaccaaaaaaaaggtcacctcgccacataataatcaaaacaccaaacatacacaacaaagagaaaatattaagagcagcaaaagaaaaaggtcaagtaacatataaggcaaacctatcagaattacacctgaattttccatggaaactctgaaagccagaaggccctggatagatattctactgacactaagagaccacgaatgccagcccagactactgtacccagcaaagcttccgatcaatatagatggagaaaacaagatattccatgacaaaaccagattaaaagaatacatatccaccaatccagccctacagaaagttctggaaggaaaactgcaacccaaggaggttaactacatacaaccagaaaaatataggcaatagataatcccactttaccaacagccaaaaggaaaaagggatagaatcccacacataattttgccaccataaccaaatcaaaaacaaacaagaatgaacaatcaagggtcattaatatccctcaacattaatggtctcaactcacctataaaaagacacagattagcagaatggataagaagacagaattcatccttctgttgcatacaagaaacacacctcaccttcaaagacagacggtacctaagaattaaaggttgggaaaagattttccaaccaaatggacccaagaaacaagcaggggtaacaatcctaataaccaacaaattggactttaaactaaaaccaatcaaaagagatgaaggaggtcacttcctacatattacaggagaaatccatcaggatgaagtctcaattctgaacatttatgccccaaatgcaaaggcatccatgtttgtaaaaaaacattactaaaactcaaatcacacataaaaccacacacacttatagtgggagatttcaacaccccactctcaccactggaaaggaacaccaaacagaaacttaacaaagaaacaaaggaactaacagaagttatggcacaattggacttaacagatatctatagaacattccatccaaatacaaaacaatttaccttcttctcagcgccacatggaaccttctctaaaatcgaccacatacttggcaacataaaaaacctcaacaggtacaaaaatattgaaataaccccctgtatcttatcagaccaccatgctataaaattagaattcaacaacaacacgaattgcagaaaacctacaaactcatggaaattaagtaacacaattcctgggtcgaggaagaaataaaaaaaaagaaattaaagatttcctagaaatcaatgagaatgcggacacagcatattgaaacctatgggacactttgaaagcagtgcaaagaggaaagttcatagcgctaagtgcccaaatgaagaaacagaagaataatcacactagagaattaacagcacaactgaaagctttagaacacagagaaaccaatacaccccgggggagcagatgccaggaaataaatcaaattgagggctgaaatcaataaaatgggaactttgtattgaataacaaaacaaagcatcaatataatgaagagttggttcttcgagaaaatcaacaagatagacacacctttatccaaacttacctaacagcagagagtgaacatgcaaattaataaaatcaggaatgaaaagggggacataacaacagacacagaggaaagccagagaatcatcaggtcatacttcaaaaacatatatacctcaaaattcgaaaatctaaaggaaatggacaattttctggacagatttcacttgccaaaattaaatcaagaacagataagcaacttaaatagacctataacccctattgaaatagaagaagttatcagaagtctcccaaccaaaaaaagcccagggccagatgggttcattgcaaaattctaccagaaattcaaggaacagctaataccaattctcctcaaagtattcaacacaatagaagcagaaggatcattgccaaactctttttatgaggcttcaataaccttgatacccaagccacacaaagacacaactaagaaagagaactacagaccaatatccttcataaacattgatgcaaaaattctcaataaaatactggcaaattgaatcagagaacacatcagagaaatcatccaccatgatcaagtaggcttcatcccagggatgaaagaatggttcaagatatgaaaacccatcaatgtaatccaccatataaacaaactgagtaaaaacaaaccacgtgatcatctcgctagatgccaaaaaagcctttgacaaaatccaacacccctttatgataaaggtcttggagaaatcagggataacaggaacatacctcaacataataaaagcaatatacagcaagccgacagccaacatcaaattaaatggagagaaactcaatgcaattcctctaaaatcaggaacaagacaaggctgtccactctctccatacctcttcaatattgtccttgaagttctagctagagcaacaagacaactaaaggagatcaaggggatacaaattgaaaaggaagaagtcaaactctcactatttgcagatgatatgatagtctacataagtgacccaaaaaactcaacaagggaactcctacagctgataaacaccttcagcaaagtggcaggatacaagattaactcaaaaaaatctgtagccgtactatataccaatgacacattggtggagaaagaaatcagagaaacatcaccttttacaattgccacaaacaacataaaatatcttggggtaacactaaccaaaaaagtgaaagacctgtaccaaaagaattttgactctctaaagaaagaaattaaagaagataccagaaaatggaagaatctcccatgctcttgaataggtaggatcagcatagtaaatatggcaatcttgccaaaagcaatctacagattcaatgcaatccccatcaaaatcccgacacaattcttcactaaccttgaaagaacaattctcaactttatatggagaaacagaagacccaggatagccaaaacatccctatacaataaaggaacttctggaggcatcaccatccctgacttcaagctctattacacagctatagtcctgaaaacagcttggtattggcacaaaaatgggcaggtagaccaatggaatagagttgaaaaccctgatattaacccacacacttacaaacacttgatttttgacaaacaatccaaatttatatgatggaacaaagagaacatcttcaacaaatggttctggcataactggatgcggacatatagaagactgcagatagacccaagcctatcgccatgcacaaaacttaagtcaaaatggatcaaagacctcaacataaacccagccacacagaacctattagaagacaaagtgggaaatacccttgaattaattggtgcaggagactgcttcctgaacattacaccagtagcacagacactgagatcaacaattgataaacaggacctcctgaaaatgagaagcttctgtaaggcaaaggacacagtcagcaaaacaaaacggcaacccacagactgggaaaagatattcaccaaccccacatctgacagagggctgatctccaaaatatacaaagaactcaagaagctagtctccaaaacaccaaacaatccaattaaaaactgggatacacccctttccatcgaccgacccaggaactacttgagtgagcctctgcccttacccaacctcagcccaaaccatcactcaccccgacctccccgccaccccgccaccctgggcctgcacctgcctgcttggtgtagacacgcacagacaaggaggagctccctgaatatggaaacaccccactcttccatccctttccgcccaccaacccaggaacgaggtgagtgagcctctgcccttacccaacccccatccaaaccatcattcaccccgacctccccaggcctgtgcctgcctgcttggggtaggcacgcacatccaaggaggagctccctgaatctggaaccaccccactcttccatctctttccgccaaccaatccacaacaagtgagaagactcccctcacctgcgcctgccggcttggagtagacacacccaggcagggaggagctccctgctcactgaacctggttgcaccccactcttcaatcctttcccaaccgacccaggaactaggtgagtgagcctctgcccttacccaacccccacccaaaccatcactcaccgcaaccaccctgggcctgtgcccgcctgcttggggtagacacacactgacaaagaggagctccatgaatctggaaacaccccactcttccatctctttctgccaaccgatccacaatgagtgaggagactaccaggagaggcaagaccatccagagttgtgaacattgaattcctggtccccacacaccactgggtcacaagaggagatagagagaccccacctgcacccactaaaagaagatatgggaagaagacagaataagatttcactcaacaacagaaagaccaatatgacaccaccagaatctatggactccactccagcaagatctgaaaagcccaacacagagcatgaagatgagatggacctcaaaaattatctcggcaagatgatagagacctttaaagaggaaacaagaaaatcccttaaagaaatagaagaaaaagcaaaccaaaaattacacgaaatggaggaaaagacaaaccaaaacattcaagaaataaacaaatctcttaaagaatctaaagaagcccaagaaaaaacatccaaacaagtgaaggaagttcttgaaacagttcaaagcatgaaagctgaaatagacacaataaagaaaacacagaatgaggccatcctggaaatggaaaggctggataaacgatcaggaactaaagatgtcagtataaccaatagaattcaagagatggaagacagaatctcagctattgaagactcgctagaggatatacattcatcaaccaaagaaaatctcaagtccagcaaatccctaacaaaaaatatccaggaaatatgggacaccgtaaaaagaccaaacctaagaataataggtgtagaagaaggtgaagaaatacagctcaaaggtacaaaaaacatattcaacaaaattatagaagaaaacttccccaacctatggaaggatatgcctatgaaagtacaagaagcttacaggacaccaaacagaccacaaaaagaagtcccccgacacataataatcaaaacaccaaatctacagaataaagagaaaatattaagagcagcaaaggaaaaaggccaagtaacatataaaggcaaaccaatcagaatcacacccgacttctcaatggaaactctgaaagccagaaggtcttggatagataccctacaagcactaagggagcatggatgtcaacccagactactgtacccagcaaaactttcaatcactatagatggagaaaacaagatattccatgacaaaaacagatttaaacaatacatatccacaaatccagcactacagaaggttctggaaggaaaactccaacccaacgaacataactacactcacaaaaacactggcaatagataatctaattttacgaaacacaaaatgaaacaggagggcgaaatccacacgcaatgacaccaccaacaataaatccaaaacaaagaagaaccaatgaacaatggacattaatatccctaaatgtcaatggtcttaacttacccataaaaagatataggctaacagaatggatacgaagacagaatccatccttctgctgtttgcaagaaacacacctcaatttcaaagacaggcgatatctcagagtaaaaggatgggaaaattttttccaatcaaatgggctcaagaaacaagctggtgtagcaatcctaatatctaacaaattagactttaaaccaaaagcaatcaaaagagatgaagaaggacatttcatactcatcacaggaaaagtccatcaagatgaagtctcaatcctgaacatctatgccccacatatacgaaaacacccacattcgtaaaagaaacattactaaagctcaaaccacacataaaaccacacacacttatagtaggagacttcaacaccccccttacaccactagacaggaccaccagacaaaaacttaacaaagaaacaaaggatctaacagaagttatgaccaactgggtttaacagatatctatagaacattccatccaaacacaaaagaatataccttcttctcagcgccacatggaaccttctcaaaaactgaccacatagttggcagcaaagcaaacctccacagttacaaaagaattgaaataaccccctgtatcttatcagaccaccatgcattaaagctagaattcaacagcaatacaaattgcagaaaacctacattcacatggaaaatgaagaacaccaattgcaccattcctgggttgaggaagaaataaaaaaagaaattaaagacttcctagaatttaatgagaatgtagacacaacatacccaaacttatgggacactctgaaagcagtgctaagaagttcatagcactaagtgcccacatgaagaaattggaggaaagtcacattagagaattgacagaacaactgaaagctttagagcaaaaagaagcaaatacaccaaggaggagtagacaccaggaaataatcaacctgagagccgaaatcaacaaagtagaatctaggaaaacagtacaaagaatcaatgaaacaaagagttggttctttgagaagacaataagatagacaaacctctagccaaactaaccaaaaggcagagagagagcatgccagttaacaaaatcagaaatgaaaagggggatataacaatggacactgagaaaatccagagaatcttcaggtcatactttgaaaacctgtactccacaaaattggaaaatctaaaggaaatggacagatttctaagataaatatcacttaccaaaattaaatcaagatcagataaacagtttaaatcgacctataacccctaatgaaatagaagcagtcatcaaaagcctcccaaccaaaaaaagcccagggccagatggcttcactgcagaattctaccagaaattcaaacaagagctaattccagtactcctcaaactgttccgtacaatagaagcagatgggatattgccaaactctttctacgaggctacaatcactttgatacccaagtcacacaaagatacaactaagaaagacaactacagaccgatttccctcatgaacatcgatgctaaaatactcaataaaatattggcgaaccgaatccaagaacatatcagaaaaatcatccaccatgatcatcccagggatgcaaggatggttcaacatacgaaaatccatcaatgtaatccactatataaacaaactgaaaaagaaaaatcacatgatcatctcactagacacagaaaaagcctttgacaaaatccaacatcccttcatgataaagatcttggagagaacaggaataacaggaacatatctaaacatgataaacacaatatacaccaaaccaatagccaacatcaaactaaatggagagaaactcaaaacgtttcctctaaaatcaggaacaagacaaggctgtccactctctccatatctcttcaatattgtccttgaagttctgattatagcaataagacaagaaaagaggatcaaagggatacaaattggaaaggaagaagtcaaactctcactatttgcagatgacatgatagtctacattagtgacctgaaaaactctaccagggaactcctacggctgataaacaccttcagcaaggtagcaggatacaaaattaaatcaaaaaaatcagtagccctactgatttttatatacagatgataaatccaatgagaaagaaatcagggaaacatcacctttcacaatatccacaagcaacataaaatatcttggggtaacactaaccaaaaaagtgaaagacctgtacaataagaactttgagactttaaagaaagaaattaaagaagataccagaaaatggaaagatctcccatgctcttggataggtagaattaacatagtaaaaatggcaatcctgccaaaagcaatctacagattcaatgcaatccccatcaaaatcccaacacagtttttcacagacattgaaagaacaatactcaactttatatggaaaaataaaaaacccaggatagccaaaacaactctttacaataaaggatcttctggaggcatcaccatccccgacttcaagctctactatagagccatagttctgaaaacagcttggtattggcacaaaaataaacagatagaccaatggaatcgaattgaaaaccctgatattaacccacgcacctacgaacaacaccttatttttgagaaaggtgctaaatctatacaatggaaaaaagatagcatcttcaacaaatggtacaattgtattcggacatgcagaaaattgcagatagatccatacctgtcaccatgcacaaaacttaagtgcaaatgtgatggggaatgtactactatgtatgtttatcttattgattgttaaataaaatactgtttggccaatcagacagcaagttagaaggaactaggagtcaaagaggattctgggaaatgtagtagagaagtgtcccgcgctatattctcgccggcaagaatcacacaggacactcggatccttctgcaggaaagctttaatgcatcttgagagaggagagcataagcttaccagagcggagaccccgagccaagaatcccatcccctaataaaggctggcagccccgcctgggacgtgtcaccctatgaatggcttcagctcctcaggccatatgagccacgggataggcagagatcaaagaaatggcaaattacccagcgcctgcgaaataatttacatttagtgcctgcaggcaccatcattgtaatggagaatgcagggatggctccctacagagaagtgctgatccaggcaggaaatgacatagcaaggagactcatatttaagcgaaggagaaacaggaagggtccttttttccccttcctcctccagcggcaggatgtgagccaccagcaaggaaggacgccaataaggcgtccaataagataagtcttataaaatatatagatttatgataattaagactgagctaacagatgagaatcctagtcattggccaagcagctttaaacctaatacaagtttctgtgtattcatttggccctaactctggcaagcagctggcgtaaagctcacacgtggcggtggggctcagtcggcttttggctgaaagatttatcataacacaaatggatcaaagatctctccataaatccagccacactgaatcttctagaagagaaagtgggaattacccttgaacaaattggcacaggagactacttcctgaacattacgccagtagcacagacattgaggtctgcaattaataaatgggacctcctgaaactgagaagcttctgcaaagcaaaggaaacagtcagtaggacaaaacgaccacccacagaatgggaaaagatcttcaccaaccccacatctgacagaggactgatttccaaaatatataaggagctcaagaagctagccaccaaaacaccaaacaatgaaattaaaaagtggggtgcagaactaaatagagaattctcaacagaggaatctgaaatggctgaaagacacttaagaaagtgctcaaaatccttggccatcagagaaatgcaactcaaaacaactctgagataccacctcacacctgtcagaatggctaaaatcaaaaataccaatgacaatctatgctggagaggatgtggagaaaaaggaacattcctccattgctggtgggagtgcgaacttgtaagaccactctggaaatcagcatggcggttgctcagaaaaatgagaatcagtcgacctcaagatccagccattcctctcttgggtatatacccaaatagtgcatgttcatacaacaaggacatatgttcaaccatgttcatagcagcattgtttgtaataaccagaacctggaagcaacctagatgcccctcaactgaagaatggaatgagaaaatgtggtacatttatataatggagtactactcagcagaaaaaaacaatggaatcttgaaattcgcaggcaaatggatgaaactagaagaaaccatcctgagtgaggtaacccagtcacaaaaagacaaacatggtatatactcactcatatatggattttagacatagagcaaaggtttaccagtctataatcctcttcaccaaaaaactaggaaacatgaaggactctaagggataaatagaccccaggaatggaagtggcatgaactcctgagcatgagggtaggggagagggagctgccacaataagagcaagagaagagaagtagaggagaggaaatggaggagcagagatattgagtagggggaagaatagaggaaagagagcaggatgagagattccatattagagggagccactataggtctgagaagagatctggaaccagggagatctccagagacctacaaggatgacatgatctgacaatccaggcaatggtggagaggataacctaaaagccctccccctaaaatgatattgatgactactctgtatgccatcctagagccctcatccagtggccgatggaagcagagacagacatccacagatatacaatgagctgaaatctggaatttagttgaagagagggaggaatgaagatggaaggggtctgtaccaggttggagaaacccacagaaacagctgacctgaacaagggagagtacattgaccccagatgctgtctgggaggccagtacaggactgatccagacccctgaacatggatgtcaatgaggaggcctctgcactccagggagcctctggtagtggattagcatttttcccaggtataagaagggactttgagagcccatcccacgtgaagggatacactctggccctggacacatggggaagggcccaggcccagcacaggaagatttggtggactttgcagagccctcgttgagggctctatcctgcctggggagtggtgggtggatggggtggggggtaggttgggggttggggggagggatgggggtgaggtgagggagagggagaagggacttacatgtgaaacaagcttgttccctaacttgaactaataaaaaaaatttttaaaaagaatatcatctcatcataaatcatttcatgtaatcagtaatattcatttctcttcctaggaggcacaaggaatactacttcctctctttgaagttaaactgaactgtgcaatagttctatccacaaaatagaagcagagacactttgaggctaaagtctctgagaagagcaagacaacaatcaacctattttccaaactcaataaatacgtaaaatgtgtagcatttgctatgttggtcatctttctgtcactgtgacagattacctgagataatcaaatcctaaggaagaaaagtttatgttggctgcagtttcaaccaggagtcagttgacactgttgcttgggcctatggtgaaaacatcagggtggaaaacatgtggtaatcatggtgaccacaaagcaaaggaagaaatatgagggaaccaggccaggcccccagcacttccttcaagggcaagcctctaatgttctaacttcctcctactataactcacttctaaatggttccactcctttctgacagcaccacagattagcaatgaagccttcaaccgagagcctttggatgacacagaactgtagcagtaggcttgatggtatgtttgtaagtgatagagaaatgttagatgtgtactaatggtaatcctaggagacagagacagtaggactaccataagtaactttagttccaggaaatccaatgcctctagcctctgtggcaccagctggggaccaagcatcctacacacaagcctgtagtagacattccacatccaaagcatactgttttgtttctcaatgtcaggaatcagaattctgggctacagcatcccactggccacatccaggccatctgtcagtattatggattgtcagaagggtatcaggaaggatcatccatttgtttcccagcatctgggtctctgtctccctccaagactaggcagcacaggagagatttctttaaaggaagaaaaccataatattttgcaagtgtctgcatacattctcattttggtcttttcctttcacttctcacagcacccccttgaggtagagtttgttataaatgtttggtatgaatcctgagattcagagagatgaaacaattggagaaataagttattttctccaggtgatagaacagttaggtagaaaaacttaacaatagctgcagatcaattatcagaatggatgaaaggaacattttattgaacacaaagctaacacggaaatcagttgtatctaaatagtatgagaccctggatttgagctaagtcttcaggcttgcaggaagttgttttttacattataacttgctgatgtcagaataagcatttctcgtggaatctaagacatgttgatgaacaactgtgtatcatgaattaataaaaagacccagagactgatattggggttgaagctgaagatgagaaaagcaaatgagcaggctactaggatcaggctgtatggactgatcctgtctccaccagctttcaccaagcctcagactgtaacctctcctcccgtggctggagaacgaatgcctcttgctgattactgaagacccggcttctatcttttatacccctttagtgctgggattaaaggcatgtgatctgttactcttttaaactgaatcaatctcgtgtatccctaggtgacattgaactcagagagattcgtctatctcttaatcctgagtactaggattaaaggtgtgtgccaccacctcctagcttctggctgctggtattaaaggtgtgtgtcaccactgcctgatctctatagccagaggctgactttgattttctgaatactcaggcaagctttaatatatcattaataatatatcactatacaactgtactgtgcaggataaatcacaagcaacaatatgccactgaatgaacatgagtggttaccatctttagagacagtaagtctagtgctacaggaagtatacattttatttgagccctggtcttagacccaaatgtagccctattctcttttgctagtgcttatggagctgcgtaaatttacaaagaaaatattggcttaacaagtaaggtctgatgaaagtttcataggaactgccgaagggtccatgttcttgctattgcactaagataacaccctgtatacaaggatgaagcaacacctaggaggaaggactccattccactgagggaaagtgcaaatagcagtgatactcagagaatggagggatgacattgggacaggacacatggagcaggtaatggagcaccagaggacgtgtgtactgatcaggctctgaatatgtggtctggggaccactgtaacaggctctcagaacttagcacaactgatgccatattataggcaccaaggcaccagcctaacctaggagcccatcacatagacccctacacctgccaaaatgagaacaaagacctaaaccattatagttcatagttctgggaaagtctctaaatgtactaaccttgcctttttagattttaaagctctgcatattgatgtttttgataattgaagtgtatgtcaaccatgatctcattttgtaagtaagaaccaaagaagagtaaggcttgtggctatactatgtagctatgcccatttgggctagacggtttctatacagtcttccagccagtgaaaaaagactttctgttggctctaagagtctgtgtgtactctgaaggagtagccccacaacaccattgtcatttgaggataagttagttaaaccactcccaactttttattcatttgtggtgacacttctcttcccaaacagtgtcccctctctcagggctccactgagctaactgtctttatccgttagaaggacaaacaagcaccatatttcttttgggtcattgtttgtctccactgcatggggaagaaggtggggaggggtgatgtccacaggcactcaggattgattctatgatgtctttcgctgtggctgtgggatagcagaggctgagaggattacccagcttctacagccagagctccaggaatcaggtgtcctgtgtagcaccagagaagtaactctgagcaagggcttgtgagttggacaacagggctgggaggtggggaagctggggaggtgaggctgcaggaggagtggccactgtgtaggctgagtagattgatgtggtctgcctggacagaaattgcttgtgcatctttggcatccaagcccaaggtggacaatggtcacctggggcacctcactgggggttcttctccaggggctgctacaggatcattggggtttgaggtatgagcataaaaggtagaatttaagataagcttgtggaaaagtgaagataaatataatatgatcatcttgatagatgtagaaaggcagtgtgtataagctgacattcattaacaacagaacatccattcacagggcctggggaattaattcattggataaagggcttgttgggttattagtcagggtgctgacttctaaaaaacagactgatagagtgtgtgtgtttgtgtttgtgcatgtgtgcacacactcgtgttaacaggggatatgcttacaggctgtggtcctagtagtccaacaatgaatgtctctccagtctccacaggaagactcaggacccagtggttgttagatcatgaaacttaatgtctcagaagtcccagtttggtgctggaatcccagggaaagcctagagagctgtcaggctttgtctatgtgggaatctcaaagaagtatgttataacaccagcaaaggaaaaggaatgcctcaggaacaggacatacaaactccccagcaagagtgaagacaagcaggcaaaaagcaaaagcttccttcttctatatccttgtgtgagctacaaccagaggtggggtctaggttagggtgcatcttctcaccgcaaatgatccaaccaagaaaatctaccacaaggacatccagctgcttcagttttagctgattccagatgtggtcaagttgacagccaggattagctgttatactgctcaagtgtaagtttggatccccagcactcaaataaaaattgggtacagccgtgtgtacttgagtcacatccctaaggaagcagagatgggtggatccctggcccttggtggacagccagtccagctacacgggcaagctctggtgacagcctccaaataccctagactcttagagtcttaggtctaaaaagtgataggctgttcgatgatttatgtaccagtaagtaagagatgcataatgtcatcaaagctgtcaaaaaaaaaaaaaaataagagcaggccttccagggatatcagcccaagacagcataacaagaaggaaatggaggaagaatatctggggagaggggttgaggagtgggggatggaaggagtggaggggtggaggctgcagttgggatgtattgtaagacggaaatacaaagaaaaagataaagaaacatctagtgcaggccctgtcagaggagcggcaggtggcaattgagattcaggagttcagctcactgcaatgcaaggcactgataggtgattcttggataggcaaggcccagagggcttcacttcctaaatgtctcttgctacttctgtgcctttacaggtttcttactgtcatttatctctggcatctggcatggtgtgaattggtgtggggggagtggggatccccaatgcctttgatgcagtgtgattaaatcataaaaatttccattctactggacatttttacccgtgaattattatgaagatgatttcctctcaagctgtactgtttaactaaagcaatgattttatacaatattagtgttagtttaaataaaatttgatgattaagagtttttaacaaagatagtaagggattatgataaaggttagtttagtgggaaaattaataccagttaaggtaggatataatgctccccctacccctgataaagcagaggctgccaaaggtacaaaatagaaacaagaaagtgtagtcatatagattatggcttaggttaatggttaggaaaacaattgaggcccaggagttagctcaagttctttttgatattgggaaatttgttcatgtgtttcagtgtgcattatagctaaaaaataaaataataataaaaaagctttaaacacttgacttcatgtaactagaaaacaaagaattggtcagttagttaaggtaattgtacaggactctaaaataggaaaagtgaaacaagtgacgagtttttctggcaattataatatctactgcttatgtaaatggctatggatgaaagactcctgacctgtgagaaatctaaaagaaaaatatgtaaagatggggttaagaaatgaattggagctgatttttccagaatatatgtttttatgatgattatgtagtaactgtgtaacttttggttatggggaaatcctctttgtaatgaacttggtgtggggagtgtgtgtgtgtgtgtgtgtgtgtgtgtgtgtgtgtgtgtgtgtgtgtgtgtgtgtgtgtgtctttctctttttggtggcctaacagaattaaatttgccccctaggtcagccctcagatagagagggcaattgagtgattagtgcaccaactccatggctccccttcaattcctgagctgctgaaggctgctccttacaccagccatctgggctcactacaataaagtactacagacagggtgacttccaaatcacatgtagaccaagatggccttgaacttattcactaaaagatgtatagatgttctgtgtatgtgaacaggtttgttttggtttgggtgggtgttttttttgttttgttttgttttgttttgttttgtttgaaacaggaatcttatgccccacaggctggcttccaaccaggttatgtagtagagggtgaccttgaacttagtatcctcctactgccacttcccaagggcaagaattccaggcttgccccagcatgcctagtttacatgatgctaagaattgaacctatagcccatgtgtacagggccaacattctaccacttgagctacaagcctgttttattctattctatcagtctatctgagttatattgtgcaaatcagtcctttgaacacacaaagatatataaactataaacttaaccaaaagatgactctcaaagggttgcagcattaggcagtagtgtaataaagctttgtactgaagatgcttccttggtgaggaaaagacaattcattcaattagagctcaagtggcatctgagaccttgagaaggcaaaggtgggggctggagggatagctcagccgttaaaggctaggctcacagccaaaaatataagagaagacaaaggtgggcattgaagaagctggaagcatcatagggggtgtgggggatttcgagtgatttaatcccaaatgcagtctattgtaaaactccactactttgtggtaactatgagaaaatcaaggacaaaatagtcaaagttgtatagaacacaatttatgcaaataaagatttttatttattcttaaatgattgtattactattgtgttgttaaacttccccttttatagtcaggatcaatggtgtctgcctataatcccagcatttgggaggtgggatgaagagaatcaggagttcgtggacatcttcacctaaacagtgagtttcaggccagcatgaaatgcattcttctatacattgtaccaccactaccctcccaaaaataggcgcttttttctcctatgaaataaggataattataaattctgggttttttaagtatctccttgcaaaaaagacacaaacaaaaaaatccaaacagattcaaatgttgcaagtctcctaatctatttcatttttgaaaatacacagattgatagaatactcaaacctaataatactgctgaaagcaacatttaatatttgtctttttgaacctttgaatatcatgagtcaacactgtacaaagaactttgctgcaataaacaaaagttgcccctagagtggcatcctgccaggaaacggggagcctggcaaagtctgggcgattcccaccaggctcttcccataaaaggacaagagtctcaccagaaccacactagagtctctgcagaaagagactccacagctggcaagactcaactcagactccactctgagtttctgtccaggtatggaggggaaggcagttgctgtcaatggaacaaggaaagtagactccagctcagggagcagagaggtgaggagtttaaggaaaggaaggagcctttaagtaggactggataggagctgaaactgggatgagagaaaaaggtggtttgaatagagagtgacttttatctttctttccctagatgaccatgagcaaactctgcttgctgctgtttctcatcgtggccaccataggctgcactgcaggtgagtcttactacaggacccagcttcctcaagtcacctctagatttaaagacagtcagcactagactgggttacttccatgacctgggtctctgagggccagaaaacatgcttttgttattgttcttgttgttttcttgttgtttttcaagacatggtttctccatgtagccctggctgacctggaactggattgtagaccaggctggcctcaaactcagagatctacaccctgaatactgtaattaaagaagtcagtcaccacaacttgtccaatcatgccttttttaaaattataattatttttaattaaatatgatgcattgttttcccatttgttttcctccttccaactttttccaattatacttcccaattcaacacaaaaataaaggcctctttgtgtttaattgtggggatatatgtatgtaattatgcataacttcctggacatgtaaatacaacctcgtccatcccccagagatgattccactgagatgtaggctggatgctgatatcctcttggaggaattgaccagtggcagtgagattgttgagaatgccctggtacagattctgtacctgtgtgtagctctaggggaacttctgtaagaactgtgtccatcctagtctccccctatgcttaggacctaggccttggcatttcaatgtctgatttgtgtccagacaaggttgtattcaattcagctctctacaggagatcaatattatttttaaatgaacaattcctcttcactgctgttttaatgtctttaaggaaaaggacaaaactttaaaagccatcttactttatctccacatgaaaatctttctcagcttgatatgagacactaaggaactgaggctaagcacagtacatgcaatccaaaaatacttgacctgcagctacttacacctgagtagctcagaccccaaagctctcattgatttccatgtttctaggttctcagaggactttgtagggttgaggccggttcgaaaggctttctattccatggtctcttggtcaagcctctgcactgtcaacctcgctatccatttttcaggcacattagggtccctgcatttcttcttcctacaactgagcttcactttattctcctttttcagaactttgggaagaaagttctccaccttcaaaccttctcttcctaattggaaatcttgttgattctcagagggaggctttgggaagtcattaggatgaatgacaaggggaggctgggtgtcccatgagagtgaaactctgcatcttctctagctaaagaaaacctggatgccaacagatgggacaatcctgcgtcttcctctctgtccagaagctgcaaggaaatcaaacaggagatgactggggcacaaggtaagtgatgaagcatttaaagaattcactgtaatcaaaacacttcaaaaccaaaagcagaggacaaaaagctccacgccagtctggggagatcctatctcaaaatacaaacaaataacccagttaggaaatcaggattttgtcctctggatcaggttttcttttttgatataaaaatgtagtagagccagacagtagtggcacatgctttaatctcagcactcttgaggcagagtcaaccagatttctgtgagtcaaaccagcctggtctacagaatgagttccagggaggtaggcctggtacactgagaaaccctgactcaaaacaaaaaagctgatagaatgtacatggcagataaaaattgcacttaaccaatttgaagggttttcagagtcaataatgactttcacaatagaaggaatcaccactatccatctccagaaagataaagtctatagccacaaaataaaaaattcctgtattccatgtgagctgctatcctgttgcctacttctatgaatctgtcaattcttgttacctcatatgagtaacctgccttatttcaagggcatgcttcaaatctcatatgtgttgtagaacagtaaatttatttttaaaacatttattgtggtgatataatattttgatttattaaagcttgccggaagattcagaaagcaaagtcagccacaagccatagaaaccaggcatacacctttaatcccaggactcaggattaagaggtagactgatagttcaaggccacactgactacacaaaattgatccagtcctaaagatacacactcagacaaaggtgaactcagcacctgggatcacatgccactaatcccagcattagggaattatataagacaggagcagggtctcagagctgtgattcagtctcagaagactctagccactttgcagtctgagtgaaactgaggagcagtgcagttgggaacagttctatgatcaacacttttgtctgagctgaggtagaggtaagagctagtagctggctgctttgtttttctgatcttcaacttgaaacttgatccccaaaatctgtctctggatctttgattatttcctgctacaatatcttgttatgtctgtgtttcggaatgtgaggatgtgtgtgcagatgcgtgcagagtctagaagagtccatctagttttcagaagctggagtgacaggcacctgtacactgccaagtgttagtgctgtgagcctgcctcaagtcctctgctagagcagtacttgctcttaaaaattgagccatttctccagcccacctcactattcttgctctattggatatacaggaatgtatataatgtatattctacatggtaggtagcacatgataaggcttattcctttttctgtagagaaatgctaggcttgtttcttactgtcaggtcttgtgacaagagctgtaacaaacatgaatgtacatatccgagtccctgttcccagttctttgggtatctacctagtggagctgttaagtcctttgataatactgtgtttaactttagaacaaaaacatcactgtcactttgggtaattctgtgttctgcctcagtcacagacacttggctttctgaactcaggcacatccccagggacacctgtgataggacactcagggtatgaggcattagccatgtttgtagtttctagagccattctgctgctggagcagagatggacaatgagcctgcacacaggagactgtgaactggttctctctacagatggtctctatttcctccgcacggagaatggtgtcatctaccagaccttctgtgacatgaccactgcaggtggtggctggaccctggtggccagtgtgcatgagaacaacatgtatgggaagtgcacagtgggcgatcgctggtccagtcagcaaggcaacagagcagacagcccagagggggatggcaactgggccaactacaacacctttgggtctgcagagggggccacaagtgatgactacaaggttggtacactctgtagccacctgggagagcatgaggatgtgagtgtagatcaagcgtgccagggagagggtggaaggttgcccttcaacatagggatgaggaagggaaaatacttatcttgaatctcaacatcatcaatgggcttttaggtaagtggggcccttttaggtggggccattgtcactgggaatggggccatctgagcatggctggccatctgtccccctggagcccagagacatcagctgtgctgaggactgtgcatgtgggtctttccttagtgaaatctcctggtcaggtcaggctcagtgttggttgctttccagaaccctggctacttcgacatccaggctgagaatgtaggtatctggcatgtgcccaacaatagccccctgcaaaattggaggaacagctccctgctgaggtaccgcaccttcactggcttcctgaaatacatgggccataatctgtttggcctgtaccaggtacttgagactgctagctgaggctgcttttcatgggtgtggagagagaggcaggtgttggaggttgggtgggtggtgccccatgttttcctaattctaagtgtaatgcgccaagataggcaaaatgtaggggtatgtggaaaagagaggagagaagtagggagggagaagagaaagggaagggaaggggagggaaggggtgggaagggaagggaagagaagagaagagaagagaagagaagagaagagaagagaagagaagagaagagaagagaggaggagaggaggaaggaatggggggagaaacctagggtgtcagagagacacagacaaaagaaatgatcctttcttatctgactggtttgcaaccatctcagttactgcacaaattctgtgtttctccctgcaggacagtgttcctgggattgtcaaagctgtatttcctatgcagtgacttcttttgttccttctagagatacccagtgatatatggaggagggaagtgttggactgacaacggccctgcattgcctgtggtctatgacttcggtgatgctcagaagacagcctcttattactcccccgacggccagagtgagtctttttgtttgtttgtttgttttgttttgtgttttgtgttttgttttttgttttttcttttttaagacagggtttctctgcggctttggaagctgtcctggaaccagctcttgtagaccaggctagtctcgaactcacagagatcccccttcctctgcctcccaagggctggcacagtgagtctctaagtctcctctgaaccttctgcaggacatgtgataaattcagttatgataagtaacagtcatttactgtccaccacagcctgattctcttctctgaatgttgtgttttgtttcagttcattcaattgattctgcttgggctctcaactatcactaacccattttacagcttaggaaactggagcactgaaggtccagcaacttgcctgagagcacagggcataagcaggagagtcagcatttgcactggggatacatgattctagaatctactctttgaaacccactgtcagtcagacaaaccaggtccctgtgcacagagctgaacaatagaaaaaaaacggagttttatttcatttgtgaggaatggctttatgtggtttaacataaacacaagtgtggtacatactctttataaatgctatgcctgtgctgtataattcaaagctcttcttatttgtgctctagatgtaaccctttaaaagttagcaagataaatataaacaggaccagaatgaatgcacttgctaactgctgtaacaaacccttggaggtactcagtagagaccttcttgtcccataagtttctctattcaaactctggcagatgggaaccttttctcaaggactggctcttggggtctggggatgtgaatagatgaagctcccccagtgggtctgatattttagactgtttatcctggaactgacaccaccaaactcaggtcttgcagctatttccagcatgttccttgaatgttttttttctgtcccttgttttcagatgaattcgctgcaggatacatccaattcagagtgtttactaatgagagagcagccaatgccttgtgtgctggaattaaggtcactggatgtaacaccgagcatgtgagtctgtgtagtgacaaaagacgctcacaaataagactgaggttgccagtgtgtatctgtgaatattgagtatggtagactgtccttttagtgtgtgtacgtgtataagagtgtgacccttccccttatcttgcttcgactcggagatcagaacttctgtctagacacagataccctctcttgtgaagaccatagtcaacattacaaactcctaatgcactgttgctgtttgcttacatattaggataaaacactcagtttcctggaatgagggtgacattgtattcatgaagtctggtacaagcctatggaggctgagattgttatagagtcaccaggtattgtcactctccacctggaatttagcttttagagtgaaacatatcatttccatccctttccagggcgtgtacagatgtcattatgtcaagggttactaggagaatcctggacatctggtagacctcacccaggccatcctctttagtataacaaggaatttctctctttggatgttgtaatatctactaacttccaaggcaggtgtaatcagctccactgtagcaacctgatgtcctctgagcctgggatcattagactcatattgttttgttttgtttttaataatttgtgaccaaaggcaggttgaagatggagcccttttattgccacagtaaaagttgtaacaagttaacatggtctggccaggatggtggtgcacatctttaacactcgtggtagagacaggcagatctgtgtgagtttgaggctaccctggtctgcatagtgagttccagatcaaccagacccacagagtaagaccctgtctcaaaaaaatagcatgttctcttgggatccaactatccctaaagtaacagtctgagaaaagggtcctcggctcctggaaggtgatcctgaagatctcagtgtccattcactcctcagtcattagcttgtccttcacctaatcaagatgaggcagctttgctgtcaaggaggaccttggaactgtgatgagaaatgatgaaatggaggagagcatgtggtgttgaaggagtagcaaactgctttcaattttggtgtataggatggatgtgggatacaggaagaactcattctggaaatatggactagatcaggaaacaacttttacatcacaccaatgggttttgtactgtataaattatgaatgccactgcaatgttttaatgggcacataagattgatgtgagcattcttttatttttcaaagatgacactggtagcctagaggtgacagattccaatggaagaaagagtaagcatgaggaaataagtattgaaatggtttctgtggtccaaatgagagcctgattaactatgatagaaattttggggagggtgggcaggaatgtattccaaagtttttaaatttattaatagttgaatacagataatgggagtagaatacattttgaataattccatggttttcatttgagtaggtgaatatcaagtagtgggccaaaatgtctggatgctgaatatgtttgtgatcaagaggggatatatagttgttttatgctgggttgttaaaacacttgtttgattttatttgtatgtgtgttcaagtgatcacaaaggacattggatccctgagatttggagttaaagtcttttgattaggtgctgggttctgacacagatgctgggatctgaactttggttttctgatagagaaataagatgtcttaactttagaaccatctctccagcccccaaactactagcttgtttgagtgggattttattttgtcttgtttcagatgtatttatttaatttgatctgtatgattgcttaacctgcacatatatgtgtgtattgcttgagttcctggtgtcctggagccagaatagggcattctatgtcctggaactggacttacaacagttgtaacccccatatgggttctgggatccaaacctggtcacctgcaagagcagcaagtgctcttaatcacagagctatctgtcagcgccaatgttaaatgctttgatcactgagtagtgattctaaatggtagtacaatctttaatccttaagcttaaagatatctgggttggaaatagggattttaagtcattagcgaattgttcacaactaaaccttaaaggggtaacacaaagtataatagagttgtaaatgtgtcccctctgggaagtagcacttaagaaattcataaagctggtggaagtggaagcagacacccacagctaaaccttgaactgaactgaaatctagttgcagagaaggagcagatgagcataggggtccataccaggctgatgaaacccacagaaacagctgagggggagctcatggttcccagactgatagctgggaaaccagcatgggactgatccagaccccctgaatgtgggtgtcagtgaggaaaccttggaaatctatggggccccttgtagtggatcagtacttatccctagcataggagtggactttgggagcccatcccatatggagggataccccctgagcctagacacaagggggttggcctaggccctatcccaaaggatatgacagactttgaagaccccctacggaaggcttcaccctacctggggagcagaaagggtatgggataggtagggttttagttgggggcaggggaggaggggagggcgagggacctgagattagcatgtaaaataatcttctttctaataataatttttaaaaaaagaaattcatgaaggaaaagtctagccagagaatctgagaaaaaaggttcagagaagttgagggaaaggtaggaagagacagtgaggccattaaagccgatggagagtggttttatggatcaaatagagccatattgccagtggagagtctgagaaggggtgaagagtccactgaacttggctattatgttgactctagccctatcagctatattagtcagttttttcctctgtgataactgagagatatgggaagtatgtgctgcatagttttatgacaacttaacacaagctatagtcatctgtgatgagggaacctcacttgaggaaatgcctccatgagatgaggctgtaggcaagcctgtagagcatttttttaattgctgattgatgaagaagggcccagcccattgtgggtggtaccacccctggactggtggtccttatttctgtaagaaaacaggctgagcaagccatgaggagcaagccagtaagcagaacccctccatggcttctgtgtcagttcctgccctgttgaatttctgtcctgactttcttcaatgatgaatagtgatgtgaaagtttaagccaaataaccctttcttcccaagttcctttggccatgatgtttcatcacagcaatagtaacccaaactaagacaaagcactctgctggcttgatggtttctgaaattttaacccatggttatttggctctaaatccataatgggccagataaatcattcaggaaagacatatcagagcaatatggctcacttcatagcagcaaggagccaagaaagatcaggaaatgccaggggaagctaccttttaagacctgtcactcacaccttcagtaatctatttcctctaaccagacactcttttccacagcaccaccacgtcccaatggtcagttcaaaatgatgactccaggggctggagaaatggctcagtggttaagagcacttggctgttattccagaggacctgggttcaattcccagcatccacatggcagctcacaattgtctgtaattccagttcctggggatctgacaccaatgcacataaaataaagttaaataaattattaaaataaaaaattgatgactccattagtgattaactaactgatgaaggcagggtcctcatatttaatctcttctcccaaagctctgcctctgaatattacttacactggggaccaggtctttagtacataacaccctttggatgggcactacatatccaaaccatgacctgctgacctctcattgctccttcctcctccttgttttccagcactgcatcggtggaggaggatacttcccagaaagcgacctacagtgtggcgacttctctgcatttgactgggatggatacggaactcacagtgggtacagcagtagccgggagataactgaagctgctgtgcttctcttctaccattgagaactttgtgctttaggacccagacttcttctccagtctgtggacaaatatgcatggagaaaaactcacctaattactagaatgctaaggataataaatcatgttctttgcaggcttggtgtcttcgtgaatcctttttgtgcaggaatgggagattcaaaaagtagtttatgttcccctgtttgattcttttgggatattatggctgggaatcctgataccagcaacactcttttttatgtattcttctctcatatattatatcctgacagcagcctccctcctctcctcagggtctctctcttacatccctctcccccagatccaatcctccatttcccttcagaaaagggtgggctccccatggctattccacaaaacctagcataacaagttacaataagaataagactaggcacatcccctcatattaaggtgggacgaggcaacccaggagcaggaaaatgttgtggaatattcctttacactgtgtgaagatatggcactgtgattggtttaataaaatcctaaatggccaatagctaagcaggaggtataccaggaacttctggacagaaagagctctgggaagaagaaaggtggaattggcagctagacatagaaaaagccagacatgaaggaggagaggcaaaagccgtgagccatgcaacagcatatagattaatagaaatgggttgatttaatttataaaaactagttaggaataagcctaagctaaaaccaagattttataattaatactaagtctctgtatcatttttttaagatggcagcccaaagaaaaatctacttaaataatggtgtccaatgtggggtcacatgtttccacagaagacctgaggaagcttttttaaaaagaagtttctaatcacacagaagcagagccaaatgtggcttcttagtcccacatattctcacctgggctgtgttacagagatgtgtcttctggcagctgcctgcaggcccgagccaccagcacaccatgagctaagctacacagtgagtttaaggtttaactcatgcagagaatgatgtaggtgcttaataaagcaaagtccagacagaaaaagaaaataaagacagtcatagaaaaatgaatagtttaaaaatagtctttagccgggtggtggtggtgcatgcctttaatcccagcactcaggaggcagaggcaggtgaatctctgtgagttccagaccagcctggtatacaagagctaattccaggacatcctctgaggccacagagaaacactgtctcaaaaaaaattaaaaataaaataaagtctttaaagagagaaatagactaataaaaaataatccatgtaagaataggaaatattgtaacacagggagtttggaccttatatggtgctttcttaattttgattttttgaatgctaatgatcagaaaacagctgctgagagacgtaggattgtggaagggactgttgaattaacccaacctatatactttagaaatgccttaactttaaaatggaagtcaaaagatgaattacattggagaagaggtaatgctttatgtttccacaggaagtgaaaggctatgggttcctttcaggttattagagatcatatttcaccaggggagaactcctgagtatcttggcttcagacatgggagaggaagccaagaaagactacaggacatgagacatataaactgatccctctgcatgggaacacctcagagataagatgagacatgacaaatattgttacctacagagtcctcatgactcatatggcatgggtagagaattatgtgataattggttatttagttcaaatggacttataaagttggcagatgcctttaaactgctcaaacacagaacaaaaaatcatctttaactgacttgtgcacaccgcacattccatacttgtgttgatacagatatgtatattacctttaaaagtttgtgtgttttcagaacaaggagaccagacaccaatgaaaacaggtggcccaggttatccagcctctcagagtgcctctgttgcaatctcctcagagttctacattcataacagcttcacgatttctggctgaaatggtccaatcccacagacatctccagtcagacttcagataaatcctacattttcccatttactgagactaaatgacagctagctctcccaggccttgatcattatctcagggtcctgggagagcagtctggaagaacatgatgcccacattcccaagaggtgggaggggtggtttttggtctttcagtagcttatggatatttgtcatcatttggggggttaattacaagttgttattggtaatgatcagaaaaaagctgaacaaaggagattagattcagggatcttgttctgaaaataaaagaggggatatagaaatgataggataaaaggatagattattgaatctacttttaaactgaaaaaagcaactactagtctcaaatatgtcacattggtggttttttttttgtgtgtgtattgaactggacttataggaggttgtgagctgcctaatgtaagtgccagtaactgcacctgggtcctctgaaaaaagcaaagtccttataattactgtgccatctctctattccccctctgcttcctccttctcttattcctcttcctcctcaccctctcctttttttctgacagagtcttctgtgtcctaaattgacttaaactgctcttacagaaggcataggtttagttcccagcgtcctcattgctcacactgtctgtaaccgcagttccaggggatctgatgccctcctctggcctccttgagcaatgcacaaattgttgtgtgactacatgcaagcgaaacagtcacacatatttaaaagaacgttggggtggggaatattatttatcttgtttgaactacatttcttaggtcctgaatgagaaattacttgtggtctctctactcttccccattcttttcatttccttctctttcctggatgacctggcttttgccaactgttctttcctgacatttttctcacctcttgtcctcattctttatcctaaagatgtggggtcagcaagatgactcatctggtagggatgcttgccagtgagctcaatgagtttagtttgattcccaggatccatgtggtagaaagagaaaactgagttggaaaattatctgctgacctccgtggcataacaacttgcatgggacacacacaaaaatatgtaagtgcataaacacatacacacacacacacaggcatggacacacacatgcataagtaagtgtaaaaatataaaaactatatggattttcttggttcctcattattctgacatgtctttcttccaattagagaaagcaataggaagcctgaatgagttttctctgttgacagtgccctgttgggagataattgaccacactatgaaccccaagttaacttttgtcttatttaaataaaactaatcttaggtcaggaggctgagttggcaaccagttgacagaaagcaatcatagagcatcagagggcatctgcaagagacggggagatgcaccagaagtcgtagggaggggttttcaggggtgtggcttttttgttttgatggagcagaaggacatgctttttggggagatgccaacaagaagagggggtgagctagttgctactcaacctccctgagctagcaggtttcaccccagcctttgaatctcaagacttacttacaaatagaatgatacagatctagttgaagctacctttcgaggccgcaacatggctggtgggaacagaattcccaccaggctgcagcccgagcagctgagccactagcagaaaagcaagttgggacctgcagagtcacaattgctggttgaaatagcagtagattaaggtagagccactgtgccaaagataaaacaacagccccctgtgtgtggcccacttcccttgtgacaggcactgttgcctgagagtgcacagcccagttgcagaagacttttgtctttcttttacatgctccccagcccttagttcaggtactagttcaataaggcccattgagctgtgaaaaggcagacaaatgagctgtgttctaaagcttttccagtgcaaaaaaatgccagtttctaggaaaccatgtcttttggagctagggaagcacggggggggggggctctaatgcagagaaggatacaggaggacctcactgagaaggtgattttgcttaattccttgccttccctagagagatgactagaatatgccattattttcatggtgtcctggtggagaaatgacttagtgtttaagagcgtgtattgctcttccagagggcttgtgtcaggtgactcatgctgcctgtgactctagttccagggaacccaatgcctctcacttttgtggcaccagctggggaccaagcatcctacacacaagcctgtagtaaacattccacatccaaagcatactgttttgtttctcaatgtcaggaatcagaattctgggctacagcatcccactggccacatccaggccatctgcctgtattatggattgtcagaagggtatcaggaaggatcatccatttgagtctcagcatctgggtctctgcctccctccaagactaggcagcacaggagagatttcttcaaaggaagaaagctgtaatactttccacatgtttgcatacatttcatttggatacaaagctaacatgaaaatcagttgtatctaaatagtatcagaacctggatttgagctaagtcttcaggcttgctggaagttcttttttacattataacaatttgctgatgtcaaaataagcatttcattgatgaacaactgtacggtgcaggatgaatcacaaacaacaattatgccactgaatgaacatgaattgttaccgtctttagaacagtaaagtgtcaagtctagtgctacggggaatatacattttatttgctacgggaggtatatattttatttgaacattggtctcagacccagatgcagtcctattctcttttgctagtgcttattgagctgtgtaaatttacaaagaaaatattggcttaacaaatgcagtcttatagtagtttcatagtaactgccgaaggagccatgtaaacaatgcaaaggccttgctattgcactaagataaccctgtatacaaggatgaagcaacacctaggaggaaggactccattccactgaggaaagtgcaaatagcagtgatactcagagaatggagggatgacattgagacaggacacatggagcaggtaatggagcaccagaggacgtgtgtactgatcatgctctgaatatgtggtctggggaccactgtaacaggctctcagaacttagcacaactgatgccatcttataggcaccagcctaacctaggagctcatcatatagaccctacacctgccaaaatgaaaacaaagacctaaaccattatagttcatagttctgggaaagtctctaaatgtactaaccttgcctttttagattttgtagctctgcatattgctaactgtttttgataattgaagtgtatgtcaaccatgatctcattttgtaagtaagaactaaagaagagtaaggcttgtggctatactatgtagctataccacttgggctagatggtttctatacagtcttccagccagtgaaaaaagactttctgttggctctaagagtctgtgtgtacactgaaggagtagccccacaacaccattgtcatttgaggataagttagttaaaccactcccaactttttattcatttgtggtgacacttctcttcccaaacaatggctccactgagctcactgtctttctctgttagaaaggccaacaagcaccatatttcttttggtcattgcttgtctccactgcatggggaagaaggtggggaggggtgatgtccacaggcactcaggattctatgatgtctttcgctgtggctgtgggatagcagaggctgagaggattacccagcttctacagccagaggtccaggaatcaggtgtcctgtgtagcaccagagaagtaactctgagcaagggcttgtgagttggacaacagggctgggaggtggggaagccggggaggtgaggctgcaggaggcgtggccactgtgtaggctgagtggattgatgtggtctgcctggacagaaattgcttgtgcatctttggcatccaggcccaaggtgggttctgggtgaggtgatatcgtgtttatacactaacaaataaagctcacctgaagatcagagggtagacattgacactagctaaccacagaggtctagagtctggacagacagacaggaagtgagatggctgggcagatagaggaatagaggcaggagacaggaactcagtcacttttcggtctgtggatttcatagaggtaagagttctagaatctggcggctctgcttctctggtctttcatctttcaccccctaatatctgactccagggtttattattaagaccaattagaacttatactatatattggctccctacatgaggctcaaatccaccaccctgagattaagagtctcattgtctactgactgagccttttccatctcttggaaacaattcaaggaaattacaaagaaatgtcctacttgttctttatacaaccaaactctgctaccagcaggaagtaacccatagggtactcaaatgaatgaaatctggcagatggatgtgttttattttgtagaatttggataattaaaatttgtatgccatgccattgatacctattcaggatttcaatgggcaactgctttgatttctgaaaaggctgattctgtaatcatacagttattagaagttatggccatcatgggaatgcctgtacaaattaatactgacaatgctccaacatatatctctagtaaaataaaacagttttttacttaatacaatataaagcatattacaggtataccacacaatcctacaggacaagtagttatagacagatcaaataaaactctaaaggatatgttaaataaacagaaatagagtgaataatgatttattgattttggattttctgaatgttaatgagaaaggaacaacaactgtgtagagacattggataatagaaaaaactacagaagtaaatcagcctgtatactttaaagatgtgctgacctcataatggaaaccaggatatgtgttttgttggggaaggggttttgctttagtgtccaaaggagaagaaaagctatggatatcaaaattgataaagaatatatttaaataagagacacctcttgattagaagaggtgatagttaatcaaacaccatgaccattcaatctaaactaacttaaaaactaacaaacgcttttcatttgatcagttataactttccataagatagcctccccaaaattaatgttgggaaagggctttgttgtttttcttttcaagagaatgagggcatctagctaagaaagctgaagatcactggacaaatgagacatctgaagaaaaaggacaaatcatacagaaaacaaatgtaccaagaaaaggagtaaattggcatattgatatgttacatctccaacaagataaaagctcttacactttcccaaatgtttgtttctactgttctctagagacgtataaggcaaatggtctttagtcccaaccccattaaaaattaaagatgggtttggctctctccttctctaaacccaagcatacttgttaaagcaaaatccaaagtctctgccacctgatatgggacagaagtaaaacaagaattaaaggactattttattgccactaatctgataatccattggttctactttgagtctttgaagctttacttgagctataaatattatctaaaaatttataagattaacatatatatatatatatattgggttttttgtcatgataccaatagtcatatagagtactaactaaatatagaaaaagacttcatctagcttcctgtacatgatttcgggtttgaatctctatcaggtaactaggaattaagtttttgtactctggatgtacataacaaatattgatccttcaacccctttgagatctgctgcatgtgatctaaattagacatctaaaatgtctaagttttcttcggtgactatggccatgcctaacagcaacctttgaagtctccaaaaggatgatagggccctgcagttgatgattccaccaggactatgataacatgactaagctgaaaacaccacctaaagatcacctttgactacaaactgcccaggacagttttgaggtggctagctgaggtgatccagactcacagactactctagccaggacctgagccaagccctacactttcccattgcacaaagattggacaacaaatgatacagttacctctcccaggacttgacaattaacctaaatttttattttcaggatcccctaaaattcctgtcacccagacagcaggaagtaaatttaagaagacaagaggtggagtgagtggtttttagtcattcagtgggttatggatatttgtcattccttggcagaattggttacaagttgttattgataatgatcagggaaaaaagctaaacaaaggagattagattcagggatcttgctctgaaaaaagggggtatagctatgataggatataagggtagattattgaatctactctgaaaagaaaaaatgaagagatagaaatagaataaaagggtggactattgaatatacttttaaaccaaaaaaagcaactactagttttaaatattttatattggcttggattttattgtatattcatacaaatgtgggcttatttttgttagaacatactgtacattcatttctaatcttagtctaggtattatgcctatgcaactcattttacaatgtaatgcaaagttttagcccttgaaagttattactaccaactatttaggataataaggaaatgcaggttagcaattagccactcattacaatcaaacttgtagtcatattatgtaagtttccaaggtcaaacaggtatattttagataggcaggtagtcttccaacatttaagagatctacagaatatgacatttaagatcttttaataacataggtacttttccctttttatgacaatgagacatgttgctcctggcagcaccaatctacttcagaaaagatgactggcatcaaagaaactccacatggagtttactttttttgtggtaaaagttagccatttgtcaagaaagtgctattccctcaactgctgacagtgtactgtccaaattggatgagcagaacacaaaagaaagaactgccaacctttgctaagacaaggcaagagagcccttcagaatattatgcttcacagaaaagtctgtccgatattccaggcctgtaggctgaagatggatgtcccaaccctgcagaggaactttgggtgactgttcaggaagtcagctgtttctgtcatttctcacattttttgaaagttgcttgcttctttctcaagtctctgatagagctacagactttatagttatagttatatctttccttgttatcagattcaggaaagaaattcactaaagaaatgtgaagtatgagacataaaaataaagttttggggctggagagatggctcagaggttaagagcactggctgctcttccagagaacccgagttcaattcccagcaaccacatggtggctcacaaccatctgtaatgagatctggtgccctcttctggtgtgcaagcatgcatgcagataactgtatacataataaataaataaaatcttttaaaaaagagcaataaaaaagtaaataaataaagttttggtaatacaagttaaaatagaaagttaattaggtatgactatttagactcaccaagataggacagatatggagtattttctctgaatatgtcaactgttaatagactagacattattgatgtatttattttatatatatatataattatatatattatatatatgcatatatatagttattgtacttactgtatatactttttcttatattagttataaacattttattattgcacaaaaaggaggaaatgtggtgatatctagtttatactctaaaacaaaaaaagctcacctaaggatcagagggtggagatagccactagctaaccatagaggtctgaggtctggacagacagacaggaagtgagacggctgggcaaagagcggaatatagacaggagaagacagaaactccgtcttttttcagtctgaagatttcatagaggtaagaactctagtgtctggctgctctgccttctctgatctttcaacattcagcccctaatatgtgactccaaggtttattattaagatctattagaactcatgttatttatgggtcacctggagttcatcactggaggtccttgctccaggggttgccataggatcattggggtttgaggtctgagcataaaaaggtgaaatttaagataagcttaagtaaaatgaagataaacataatatgtttgtcttgatagatgtagaaagggtggtgtgtgtaatctgacatttaatcacaacagaacatccattctcaacaaaacatccattctcaacaaaacatccattcacagcaaaacatccattcgcaacagaacatccattcacagtggctgggtaattaactcatttgaaaaagggtttgcagtacttatccctagcataggtgtcgactttgggagcccattccacatagaggaatactccctgagccaagacccacgggggtgggcctaggcgctatcccaaagaatacgatagactctgatgacaccctatggaaggcctcaccatccagggggagcagaaaggatatgtgataggtagggttttagtggggggaaggttggtaggggaggaggggagggagagggaactgggattgtcatgtaaaacaatcttgtttctaattcaaataaaaaatctgaaaaaaaaagaaaaagaaaaaggtttgtagggcatattagtcatggtttgctaaatgaatagaacagagacggaggtggatttattatggtagcttacaggttctagtagtacagaaatgtatgtctctccagtctccacaggaaaggccaaggacccagtggttgttgggtgcatgagacttaatgtctcagcagtcccagtctggtgttggagtaccagagaaagcccagagagctgccagtcttcagtctagatggggatctcaaagaagtatgttataaggacatctgttcaactatgttcatagcagcattattttgtaatagccagaacctagaagcaacctacatgcccctcaactgaaaaatggataaagaaaatgaggtacatttaaacaatggcatactactcagtggaaaaatacaatggaatcttgaaattcgcaagcaaatggatggaactagaagaaactatcctgagtgaggtaacccagtcacaaaaagacaaacatggtatgtactcactcatatacggatttttagacatagagcaaaggattaccagtctataatccacacctccagagaagctaggaagcgagaaggaccctaagagagacatgcatggtcccccacagaaggggaaagggacaagatctcctgagcaaattgggagcatggagggatggagagaggaaattaggagaaaaggaaggggagaagaggaagggagaggaggacatgagggagcaggaagattgagttgggggaagaatagaggagagcaagaaaagagataccataatagagggagccattataggtttaaaaagaaatctggccctaggtaaatgtccaggattccacaaggatgaccccaactaagaatcgaagcaatagtggagaggctgccttaaatgtccttcccctataatgaaactgatgactaccttaaatgtcatcctagatccttcatccagtagctgatggaagcagaagcagacacccacagcaaaaaacactgagccaaactcctggaatccagttgcagagagggaggagtgatgagcagtttagctttcctgcctaactttattcttttcaactactggccggtcagcttgtttattacattaatcatagcaacacatatttacacagtgtgcagaaggattattccacagcactgactttctcaagttgtcctctgacttccatacatgtacacccttgcacatacacacatgcaatgaaataagacaggcatagtggcttgtacctttaatcccaggactttggaggcagagcaggtgtatctctgaattcaaggccagcctgttctacaaagcaagttcaggacagtaaaggctacacagagaaactgtcttgaaaaccatttttattaagtaaggtgtgatgaagcacaccttaataaaagcatgttgccacacacacaccttttttttttttcaaggatgggaatgaaacccaagactctagttttttcatattcttgtcatcatgttttcacttcataattatgcacaacagagagtcaaactttgcccagttcagtctgtagcacgagaagaaaggtcaactggggtaacttctgtcccctgatcttgctctcaccaccactacccagatcatcattgccaacagtaggtgtaacacgctcactagttctacagactcactactaatgtctctgctgcataaggaagctgatctaaatgacacgtgagtcccaaagagagcaagggaaaactggagagatcatctgccatagaacccactgaccagcagcaattgtttgctttgctttcaattctgtcagtgattccgccctaatccaatcctgagagtaagggtgagggaaagcatgggaatgacccagcagatgttaaacccaacagaagccagccatgccctctaagtcctgctcaaattgtagcctccagacaaaagaaattgttcctgttttaaatcactgaatcacacagagaggtaactgacacaatcactaggacatgggcttttagccccagctgatacacggtgacaacaatatttttaacagcatcacaagaccatcatggtggtggtggcagtgatatgcatgtatgtgtgtctgcgtctgtatctgtgtgtctgtgtctgtctgtgtctgtgtatctgtgtgtgtgtgtgtatgtctgtatgtctgtatgtatgtatgtatgtattatgtatgtatgtatgtatgtatgtatgtatgtatatgtgtgtatgtatgtatgtgtttgtgtctgtgtctgtatgtatactgatttgtttttgttttttcagacagggtctctctcctgtagctcaggctgccattcaggtcaccatgtagacaaagatgacattgagtactttatcctgtgtctccacctcccaagttccaggattaaggatatgggctataattcttatctaaggcttgtgttttataagaatcctttttggcagcagtgtgctgttaggggatatttgatgccatgtgacccctgagtttgcatttgcattaattaaataaaataaatcttgggtcaggaggcagacttagcaactaattgacataaagtaattatagagcatcagaggtcatttgaaagagataaaggaaaacacaggaagtggtggggtggggcttgagtactgtggctttttctatttgggtagagcagaaggatgggctgtttctgggagacgccagcaaggagaagaaggttagctaggagctactcaacctctctgagctatgaggtttacaacccatcctttgagtctggagttttatttataaatagaatgagagagattgagtaaaacctaactttagtggaactggcagagccacagtctgtggaaaaaaattcttcccaggcttaggtctgagtggccagggcactgccccagaagctggctggtacctacagaatcacaattgctggttgaaatatctgtagatgaaggtgcagtcactgtgctaaaagataaaacaacagtgtggaaagtattggagtcagccaatactggaaacaagtgagttagaattctcaaaatgggccgacctgatccataacgagagccctcatccagtggctgatggaagcagaggcagacatccacagatatacactgacctgaaatctggaacttagttgaagagagggaggaatgaagagcaaaggggttggtaccacgttggagaaacccacagaaacagctggcctgaacaagggagagcacattgaccccagatgctgtctgggaggccagtacaagactgatccagacccctgaacatggatgtcaataaggaggcctctgcactccagggagcccctggtagtggattagtattttccctggtgtaagaggtactttgagagcccatcccacgtgaggggatacactctggccctggaagatttggtagactttacagagcccccgatgagggccctaccctgcctggggagtggagggtggatggggtggagggtaagtgggggttgggagtagaggtatgggggtgagggagagggagaagggatttacatgtgaaacaagcttgttcccaattaaaattaaataaaaaaaaagaattctcaaaatggaggccaaaggcttgctgtataagtcaccagcatctggcccatatcaggtcattgtcctaaggcaggtgtttcactccctggccagtagttatttcaagaatagcaattatttggggtgaattgtggtgatttcatgtgaagtccttgtccagtgcctcagatgatgtttatgtttggaaatagggttttcaatacagcgattaagtgaaaactagataattaggacagctcctaattcaacagagctggtctattttcaagatgaggaagtttgagcccagagagagacatcaggagcacatgcactcagacagaccatggagagaacccagtgaggaggcggctgtctacagtcagcagagaggccttggaaggagagtctgctgatgcactcatcttggattcctgtccccagaactggaggaaagaagctgacagtgttcagaccacctaatcttccagtccccaaaagagcactgttgcactacaggacccatctgtggccaacgaggacagtcatgaagaaggtcctaggaaatgcttcctccctcctgaaaaagaactgtaggaatgaagagccattctcccttgtcttgtggtaatacatggagcagcagtagctactctgagctcactcataggtgaagcaagatggagacagaaagagcctacagccttgaagacataaagaaactgcaatgtcagctaagcctggagcttctctctttctagagttcttatatcatgaagtgatatatttactttttatttcatttttaactgtgtgtgtgtgtgtgtgtgtgtgtgtgtgtacatgtacatgagtgtgggtatccatgaaggtcactggtattgaagtcacctgacatgggtgctgagaattgaactcaggccctctggaggaatgacatgtactcttaactgctgagccatctcttcagtcctaatagatttacactttttatttttattgaaagcagattcttctctcatataatacacagtttttctacctccactcctcccaaatcctcccatgtctcctctccccaaaatcaactgtccctccatttcttccacagaaaacagcaggcctccaagagaggacagccaaacaggacaaaacaaggtacaataaaaggaaaaagccctcatgtcgagtctggacaagaaaacccagtaagaacaaaatattcccaagaacgggcaaaaaaatttagagataccccctactcccactgttaggagtcccacaaaaacaccaagctcacagccataacatacacactgcagaaccaagcagccccatggttgcacgttttaaagctactttgaggtggcatttctgttagtcaccactgaatacttccagacctgagccagggtcaaggactgtggggttaggatcaggccacatgaagaacagatataacaggcagtaggagctagacactggtggttagggaggtgacagcctccaaatagcctagagtttcttagagtcttaggtcctatgacttatgtaccagtaagtaaaagatgtataatgacatcaaagctgtcaaataaaaaaaaaaagagcaggcctcccagggatatcagcccaacacagcataacacaaagggaagggaggaagaatatctgggggagaggggctagggagtaggggctaggatgagtggaggggtggaggctgcagttggggtgtattgtgtgagagaagtaaagaatagtgggggccatgtcagaggagcagcaggccgcaattaagattcaggcactcagctcactacaatgcaaggatgaaccttggataggcaaggcccagaaaactttttctccagaatgtctcttgctactgctgtgccttcacaggtttgccgttgccatttatctctggtatgtggcaccgtgtgaatgggtgtgaggggatccccactgcctttaatgtagtgtgattatctcatggaaatattgcattttactgggcatttttacctgtggattattatgaagatgatttcctcttaaacggtactatttaattgaataaatgagtctatacaataatagtgttagtttaaatagaattttgatgattaagagtttttaacaaggggctggagaaatggctcagaggttaagagcactggctgttcttccagaggtcctgagttcaattcccagcaaccacatggtggctcacaaccatctgtaatgagatctggtgcccacttctggcctgcaggcatatgcagatagaacactgtatacataataattttttaaaaagttttttaacaaatatagtaagggattatgatagggattagtttagtgggaaaattaatatcggtaaaggtacgatatagagcgcccctacccttgataaagcaggggctgaaaagggtacaaaatagaaacaaagaagtgtagccatgtagactatgacttaggttaatgattaggaaaacaattgagtcccaggagttagctcaagttctttttgatactgggaaatgagttcacaggtttcagtgtgcataacagctaaaacttcatgtaactagaaagcaaagaattggatggttagataagataattgtccaggctctaaaacatgaaagtgaaacaagtggccagtttctctggcaattgtgagatctactgcttatgtaaatggctatggacaaaagtctcctgacctgtgagaagtctaaaagaaaaatatgtaaagatgtggtttagagatgtattgggactgacttgttccagaaaaatatgttttatgatgattatgtactaactgtgtaacttttggttatgagaaaaaaattcctctctgtaatgaacttgatgtggggaacattaatagggtgtttaaaatagaaagaaatagaagatagaaagacaccctggttccccttaaatttctgagccgctgaaggctgtccagcctaggaaccaatgaaataaaggagtacagacagggtgacttccaactcactatgtagacaaagatggtttgaacttattcatttaaaaatgtgtagattttctctcgtgtgaacaggtttgttttgggttgggttgggtttttctgaaacagggatcttatgtaccagaggctgtcccccaacctggctaggtagtgggggatacccccaccttctgatcctcctacttccacttcccaagggcaggaattccaggcatgtcccatcatacctagtttacattgaagggaccagctccccattttggcagtcatgacggtaacacgtgcttgccatgaccttgccttggtcactaagaggtcagatgcctgcctcgtggcaaggaaccaatcagaagttagctggtggcgctatgctttactgctctgggtgtgctttacggacaagtacacagcaatgatgagcagagcatagcaaccaccctgggagggcctatgggccataacaaccagttgaccaacacagggcaatccctccaagcctggaggcacaccaatcctgagcctgtgcttacccctagacactccccttacactgccctacaagatctctatgcagccccttcgagctgtcttttctagccatccaccatggcgggtgggtgaaagacccgagctaacatggcattagctcgtttaacaacaataaagcctcctgcagtttgcatcaagctttcttctccacattgtgattggggtggccgaggtcctgggctgagatcctggaagcctaagctttccagggggtcttacaacatgatgctaggaattgaacctatagctcatgtgtacaaggcaagcattctaccacgtgagccacatgcctctgtctcattctatactatcagcctttctgagttatattgtgtaaatcagtcctttgaacacacaaagatataaactataaacttaaccaaaaggtgactcccagagggttacagtattatcagtagtgtaataaagctttgtgctgaggatgcttcactgctaaagaaaaaccagttcattccattagagcccaagtggcatctgagacctggagaagacaaagatgggcatggaggaagctgggagcatcttcagggggatttcgagtgacttaatcccaaatgcagtctattttaaaactccactacttagtggttactatgagaaaatcaaggacaaaatacagagggttgtatggaatttatgcagactaaaggtttttatttgtccttaaatggttcctttactattttgttcctttttacagtcagggttgatgacgtctgcctataatcccagcacttgggaggcgggatgaagagaattagaagttcaaggacatagtcatataaacagtaaattcgtggccagcctgggctacatgaaatgtactcttctatatattgtgcaccctcccctgaggaaaaaaacttttgttctcttatgaaataagaataattataaatattttggtttggttctttgtcttgttttgttttgttttgggggtttttttgttttggtttggtttggtttggtttggtttggtttttttgagacaaggtttctctgcgtagctttggagcccatcctggtgcccactctgtagaccaggctggcctcaaacttacagagatctgcctgcctctgcctcccaagtgctgggattaaaagcatgcaccaccaacacaaggcatatttggggagggttaagtattaacttgtaagaaagacacaaacaaaaatatcaaaacggatgtcaaatattgcaagtctcctaatctatttcccttttgaaaataaacagatccataattctcacacctggtgacagcactaggacatggtatttactatttgtcttttaacgactttgaattccatgagtcatcactgtacaaagaacttccctgcaatgaatataagttgaccctccagtggcatcctaccaggaaatggggagcctggaaaagtctgggcgattcccaccaggttcttcccataaaagacaagagcctcaccaggaccacactagagtctctgcagagagagagagagagaagttcgtctccactcagctggcaactctgagtttctgtccaggtatggaggggaaggcagttgtgtcaatggaacaaggaaagtagactccagctcaggtttgctttagggcccagagaggtgaggactttaaaggaaaggaaggagcctttaaataggactggataggagctaaaaccgggataagagaaaaaggaggtctggatagagagtgaccttcaatcttgctttccctagatgaccatgagcaaactctgcttgctgctgtttctcatcgtggccaccataggctgcacagcaggtgagtcttgctacagaacccagcttcctcaggtctcctctatctttaaagacagttagcactagactgggttacttccatgacctgggtctctatggccagagaacatgcttttgttgttgtctttcttgttgtttgttgtttttcatgacagggtttctctatgtagccttggctgtcctggaactggattgtagaccaggatgacctcaaactcaggtatctgcatacctatgattcctgagtgccaggattaaagaagttagccaccacagcttggccaatcatgccttattaaaaaataattataatttttaattatatataattgcattattttcccatttcttttcctccttccaaccttttccaattataccccccaactcaacacaaaaataaaggcctctttgtgtttaattgtggctgtgtgtgcaagacttagtcgatcccccagagatgatgccattgagatgtaggctgggtactgattgccccttgtaggaattggccagtggcagtgagattgttgattctgtacctgtctaggggaacttctgtaagaactgtgtcccgtccgagtcactccccatgcttaggaccttggccttggagtttcaatgccaagtgaatggtctgatttgtgcccagacaatgttgtcttcaattctgctctctacaggaattcaacattattttaaaatgagcccttcctcttcacagctgtttagtgtttttaaggaaaaagcaagtccctgcatttcttctccctgcaactggacatcactttattcatctttttcagggctttggacgctaagttctccagcttcaaacctgtcttccctcttcctagttggaaatcttgttgattctcagagggaggctttgggaagtcattaggatgaatgacaaggggaggctgggtgtcccacgaaagtgaaactctgcatcttctctagctcaagagaacctggatgccaacagatgggccaatcctgtgtcttcctctctgttcagaagctgcaaggaaatcaaacaggagatgactggggcgcgaggtaagtgatgaagcgtttaaagaacacaccgtaatccaaacacttgagagcccaaagtagaggaataaaagctccaagccagtctggggagatcctttctcaaaatacaaacaaagaacccagttaggaaatcaggatttttgtcctctggaacaggttttcttttttgatataaaaatgtaatagagccaggcagtggtggcatatgctttaatctcagcactcttgacgcagaggcagccagatttctatgagatcaaggccagcctggtctacagagtgagttccgggacacctatgattgttacacagagaaaccctgactcaaaaaaccaaatgaaaagaaaagaaaatagaatatgtgatagaatatacatggtggataaaaattgcccttaacctatttgaagagttttgagagtcaataacaactttcatgatggtatggatcaccactatccatctccagaaaaatgttcattacttaaatgaaaagtctatagccacaaaatgaaaatttcctgtattccctgtgagctgctgtcctgtatccaacttctatgaatctgtcaattcttgttacctcatatgagcaatctgccttatttcattagcatgcttcaaggctcatgtgtgttgtagaatggtaaatttctgtttaaaacgtttattgtggtgatatattatttatgacatattaaagcttgcctgaggattcagaaagcaaagtcagccacaagtcatagaagccaggcacacacgtttaatcccaggactcaggactaagaggtagacccatctctgttagttaaaggctgtgctgtctacacaacattgatccagtgctaaagataaacagctcagacaaaggtggtctcagcacctgagatcacatgccattaatcccagcattagggaattatataagacaggagcaaggtctcggagcttgcattcagtctcagaagtctgtagccacttgaggagagcatagcagtctgagtgaaactgaggagcagtgacatcaggagcagtttgagactcacccctttggactgagctgaggtagaggtaagagctagtttatggctgctttgcttttcttatcttcagcttgaatcttgaaccccaatctctgtctctggatcttttatttttcctgctacaatatcttgttatgatttgtgaatggattacatgtctgtgtgtgggaatgtgtacatgtgtgtgcagatacgtgcagagtctagaagaggccatctagtcctcaggagatggagtgacagacacttgtacactgccaagtgttagtgctgtgagcctgcctcaagtcctctgctagagcagtactttaaaatggctcttaaaaatggagccatttctccagcccacctcattctttttgatctattggatacataggaatgtgcacaatatatattctgcatagtagacagcacacgatattgcttattccttatctgtagagaaatacttggcttttgacaagagttataacaaacatgaatgtacagatcgaagttcctgttcccagttctttgggtatcttccaagaggagttgctaaatcctttgataatactgtgtttaactttaaaacaaaaacatcactgtcactttgggtaattctgtgttctgcctcagtcacagacacttggctttctgaactcaggcacatccccagggacacctgtgataggacactcagggtatgaggcattcaacatgtttgtagttcctagagccattctgctgctggagcagagatggacaatgagcctgcacacaggagactgtgaactggttctctctacagatggtctctatttcctccgcacgaagaatggtgtcatctaccagaccttctgtgacatgaccactgcaggtggtggctggaccctggtggccagtgtgcatgagaacaacatgtatgggaagtgcacagtgggcgatcgctggtccagtcagcaaggcaacagagcagacagcccagagggggatggcaactgggccaactacaacacctttgggtctgcagagggggccacaagtgatgactacaaggttggtacactctgtagccacctgggagagcatgaggatgagtgtagaccaagcgtgccaggagagggtggaaggttgtccttcaacatagggatgaggaagggaaaatacttatcttgaatctcaacatcgtcaatgggcttttaggtgagtggggcccttttaggtggggccattatcactgggaatggggctttcagtgttggttgctttccagaaccctggctactacgacatccaggctgagaatgtaggtatctggcatgtgcccaacaatagccccctgcaaagttggaggaacagttccctgctgagataccgaaccttcactggcttcctgcagcacctgggccataatctgtttggcctgtaccaggtactcaagactgcaggctgaggctctttacatgggtgtggagagagaggcaggtgggttatattccatgtttctctaattctaagtgtaatgagccaaggaagacaagggatacaggtatgtggaaaagagaagagaggagagaaaatagaatggaatggaatggaatggagaggagggagggggaggaggatggaaaggaagagagagggagaggaaggaatctagggtgtaagacacacagaaaaatgaaatgatcctttcttatctgactggtttggcaaccatctcacttactgcacaaatgctgtctttctctttgcagggcagtgatcctgggattgtcaatgctgccatacttatccattgacttcttttgttccttgtagagatacccagtgaaatatggaggagggaagtgttggactgacaatggcccagcattacctgtggtctatgatttcggtgatgctcagaagacagcctcttattactcccccagtggccagagtgagtcttaaatactcctgtgcaccctctgcaggacacgtggtaaattcagttatgataagttacagtcatttactgtccaccacagcctgattctcttctctaaatgttgtgttttgtttcagttcattcaattgattctccttgggctctcaactatcactaacccattttacagcttaggagactggagcactgaagatccagcaacttgcctgagatcacagggcatcagcaggagagtcagcatttgcactggggatacatggttctagaatctactctttgcaacccactgtcagtcagacaaaccaggtccctgtgcacagagctgaacaatagaaaaaaatggagttttatttcgtttgtgtgggatgactttacattatttagcataaacgcaagtgtggttcatactctttataaatgctgagcctatgcagtataattcaaagttcttatttatgcttgagaggtaatgctttaaaagttagcaagataaatatgaacaggaatagaatgaatacacttgccaactgctgcgacaagccctttgagatactcagtagagaccttcctgtatcataaatttctctatttaagctctggtagatggggaccttttcccagggattggctcttggggtctgggtatgtgaataggtgaggctcccccaatgggtctgatattttagactgtttatcataaaactggcaccaccaaactctggtcttgcagctatttctagcattttccttgaatgctgttttctgtctctcatttacaggtgaattcactgcaggatacatccaattcagagtgtttaataatgaaagagcagccaatgccttgtgtgctggaattaaggtcactggatgtaacaccgagcatgtgagtctgtgtaatgaaaattaggttcatgaacaagactgaggttaccagtgtgtacctgtgaatattgagtattggagactgtccttttagtgtgtgtacgtgtataagagtgtgatctttccccttaccttgcttggtctcagggatcagaacttctgtctagatacagataccctgtcttgttcaagactatactcaacattacaaacttgtaatgcactgttgatgtttgcttagattttaggataaaacactcagtttcctggaatgagggtgacgttgtattcaggaagtcctgtgcaagcctttggaggctgagattgttagagagtcaccagggattgtcactctccacctggaatttagcttttagagctaaacatattttagagtttacatattgtcattgtgtccaggggttactaggagaattctggacacatgtgagacctcactcaggccattctcttctctatcataaggaatttctcttgctgggtgttggcatattagctaagtgcaaaggcaggtacacctggctccactgaagcaaactgatgtcccctgagcctgggatcattagactcatattgttttgttttgtcaatgatttttcaccaaaagcaggttgaggatggagtcctttatttaccagagtgaaagccggaacaagttaacatgttctgaacaggcatggtggtgcacatctttaatcccagaacccaggtggtacggacaggcttatctctgtgagtttgagtccatcctgatctacatagtgagttccaggtcaactagagctactcagtaagaccctatctcaaaaaatttagcatgctctcttggaatccagccctccctaaagtaacagtctgagaaaagggtcctcagctcctggcaggtgatgcttaggatctcagcgtccattcattcctcagcttattcttcacctggtcaagatgagacagcttttctgtcaaggaggaccttgagactgtgatgtggaatgatgaaatgggaagagcatgtggtgttgagggagtgttaagctgctttcaactttgttgtgtaagatggttgtgattacagaaagaactcattttgaaaatgttaacatgaactagatcaggaaataacttttacatcacaccatggtttttagattgtatgtgataaacaccactgcaatgttttaatgggcacataagattgatgtgagccgggcgttggtagcactcgcctttaatcccagcactcgggaggcagagacaggcagatctttgtgagttcaaggccatcctggtctccagagctcgataggctccaaagctacacagagaaatcctgtctccaaaaaagaaagattgatgtgagcaagcttttcttttttcaaaaatgacactggtacctagaggttacagattttaatggaggaaaaactaagaaaaggaaataagtattgaaatgacttctatgatccaaatgagagcctgatgtagtgtgatggaaatttgggagaaagggttgggaactaacgaataccaaaggttttaagtttatcaatggttgaatacagataatggcaagagaagacagctgcaatgagtctttttctgtcccaaagcccctctcatataatgacacagagacttattaattgtgaaagcctggccttagcttaggcttatttctaactagctcttataacttaaattaacccacatattttaaatctctgtttgtttatttatttagtttatataccaaccacagtttcccctccttcctctcctcctgttccctcacccacatcccttctacctgcccccatccactcctgcatctccattcagaagaggtaaggcctcccacgggagtcaacaaagcatggcatatcaagttgaggcaggaccaagctcctcctcctccttccatcaaggctgggcaaggcatcccaacatagggagtatgttccaaagagccagttcatacagaagggccaggttctggtcccacttctaggggcaccacaaatagaccaaagtacataaatatcacccagatgcagagagcctagggcagcagtcctagctgtccatccagagtccatgagctcccacaagctcaggccagctgtctcagcagatttccccatcatgatcttgaccacccccttgctcatacaattcatccaccctcttcaactggactccagagctcagcccagtgcttggctgtggatctctgcatctgcttctctcaggtgctggatgaaggctctacgtgacaagtagagcagtcaccaatctggttacaggggaaggccagttcagagaccctctccactaattgctaggagccttgtgagttcccaggagccttcctggcactgttggacccaaaagtgaagtccaaccccaggagatgcatcctacagagtcactcacaggacacaagttcggtgcaaaagcaaaaggattttattccaaagcgttggagtcatttcctgggaagagaacggccctgagtttccaaagcaggcagtttttatgtctttttggtcactaggcaagagtatgataacatattgattggctataacatacatgagtcatttactgattggttgggaactgaacttacaattttgccctgaaggggtttggaatgttattttggtttttacacatgcaagaccatgggacagctagtggtttttctggaaacagagtggcttatacttattttcaaaacttgggtgctctggagcacagtaacccataacaattttttaaagactttatttatttattatgtatacaacattctgcttccatgtatatctgcacaccagaagagggcaccagatctcataacggatggttgtgagccaccatgtggttgctgggaattgaactcaggacctctggaagagcagccagtgctcttaacctctgagccatcccctccacccataacgatttttagaaaccagacggttgttgaagataatagaaactagtaataataacaatttccagagactggtcatcatgaccgaccatttcatgtgttctttgtcccagagctgtgtgtggccagagtgattttcaaatacatgctggtgggtatcaggctaggcttgagttggggtctttcagcaccaggtttctccctaacccacaatggacccctctttcaacatttccccccatcactctcccactccttcctgcctgcaacaccatcatcctgatccagcgtgttccccttcccccatcccctcccctctaccccccccctcgccccaaggttacctcatcccatatatttccacttcccaggaagactcgtgcgtgcctcttagggtcctccttctaacacacattgtttaatctacattcttccacatgctcattacgtcatctccattctgcccatcctgcttcttctacctatggctggcaactctgcctttcttcctcccagagctctcgctgtccagaagtcacactgacacgtcttcacacagtgtaaaggagtatctcataacggatggttgtgagccaccatgtggttgctgggaattgaactcaggacctctggaagagcagccagtgctcttaacctctgagccaaccaatcattcaaaacagacgttttgaatgatttcatgattttcatttgagtggatgaatatcaaatagtaaaccaggatgtctagatgctgcatatgtttgtgatcaaagacggatatagatagatagatagatagatagatagatagatagatagatagatagacgattctggattttcaaaacattgatttgattctgtttgtatgtgtgcacatgtatattcaaatgatgatcacagaggtcaaaaggagactttggatccctggggattggagttaaagtcttttgattgggagctgggatctgatacagaagctgggatctgaactttggttctctgatagagaagtaagatgtcttaaccatagggccatctctccagcccccatactacttgcttatttggatgggattttattttgtcttgtttcagatgtatttatttaacttggtatgtatgagtgttttgcctgcacatatatgtgtgtattgcttgagttcttggtgcccttgagccagaatagggtattctatgccctagaactggagtgacaatgttttgagccccaaatgggttctgggacccaagcaacaagtgctcttagccacagagccttaatgctacatgatttgatcactgatgaactttatatatgatggtggtcccagagtagttgtattgcctactaacatcatagtcattctagcttgtggaagtacaacctatgatgttcacagtgacaaaattgtcaatgaacttccccaagtaaatccccatttttatgtgtggctgcaggtaactgggttgttggtttgtttttggtttgtttgttgtcatgtgatgtctgaaggccctgagtagtgattgaaaataatagtcctatctttaagtcttaaagtcaagaaatttctagattggagatagggattttaagttatcagtgaattgttcacaagtaaacctaaaggggtaacacaacatagaagagagttgtaaatgtgtcccctctgggaattagcatttagggaatcaatgaaggaaatgtctagccaaggaacctgaatacaaaggttcagagaagttgaaggaaggggaggaagaaacagtgatgccactaaagtcaatggaaggggggtttatggatcaaataactcagtactgccaatggagagtctgacgagggacaaagagttcactgaacttggctattaaggtgtctctgggctcatcggctacatgagtcactttttggccctgtgataaatacatgagagaaacaataaatggatagaaaggttgctgtctagttttatgacaacttgacacaagctaaagtcatctgagatgagggaacctcaattgagaaaatgcctccagaagatcagactgtaggcaagcctgtggaatgtttacttaattgctggttgatgaaggagggcccagcctattgtgagtggtgcaaacccaggcttagagtcttgagttctataagaaaacagactcaacaagccatgaggaccagccagaaagctgcgcttctccatggcctcagcatcagtttctgcctccaagttcctaccctgttgagttcttgtcctgattttcttcaatgatgaataatgatgagaaaggttaagccaaataaatccttttcttcccgagttgcgttggtcaccatgtttcatcacagcaatagtaaccctaaagggctttgttggtttgatggtttctaagattttaacacacagacatttggctctactgcttttcaatccatagtggggcagaaatatcattcaggaaacacatatcagggcaacatggctcacttcatagcagcaaggagccaaagaaaaccaggaaagaccagggcgaaatgcccttcaaaacaagccactcacaccttcagtgatctatttcctcaaaacagatccccacccccatacccagcttcaccaccaccaaacagtcagttcacaattgtgaatccatcagtgatgagccagttgatgaaggcagggtcctcatgtccaagcccttccccagagtcctgcttactctggggaccaggtcttcagtgcataacacctttggggagggcactacacatcaaatcaccagctgacctctcattgctactcccccctctttggtttttagcactgcatcggtggaggaggattcttcccagaagggaaccctcggcagtgtggagacttctcggcatttgactgggatggatatggaactcacactgggtacagcagtagccgggagataactgaagctgctgtgcttctcttctaccattgagaactttgtgccataggacccagacttctccaatctgtggactcacatgcaccaagaaaaatttacctagtaactagaatgctaatgacccagaaaaggaaaataaatcatgtttattgcatgcttggtgtcttcatgaatcccttttgtgcagggatgggatccgtgttttttgtttgttttttcttggcttttagagacagggtttctctgtagctttggaggctgtcctggaactagctcttgtagaccaggctggcctcgaactcacagagatccgcctgcctctgccttctgagtgctgggattaaagttgtgagccaccactgcctggctaacaggaatgggattctgaagaatttctgctaccctgtttgattttcttgggatatcagagctggggatcctgatacagcaatactctttcaggtagccctcaaacatcacaagagatacaggacagagatgaggcatgctactccactacttcctcattttattggggttctttgcttgtttgattattttagatgggtctagtgtattctgtgctggccataaactcccaatgtaacatgccctgggtaaacaaaaataatacataggatttcaattatttacttaaagggtaaataattaaggtggccccaaggtaaaggtgcttgccaacaaacctgatggcctgagttcagtttctagaaacacatggttgagagagtctacttctgagagacgtcctctgacctctgcacatctgtcacggtaccagctcacaaacacataaactcacgcacacttgagggcacatgaataaacaggtatattaaaatttttctttggggatgaataatattccactttttatctttttcacatcatttttattaatttctttatttaaattagaaacaatcttattttacatactaatcccagttccctctccctcccaccctcccactcttcccaccatctccccatcccacccccatccactcctcagagagagtgaggcctcccatgggggatcatcaaagtcggttacaatatttggggcagaccaagaccctcccccctgtatctaggctgagagagtatccctccatagggaatgggctccaaaatgccagttcatgaaccagggataaatactggttccattgccagaggccccatagactgccccagcccctcaactgacacccacgttcacagggcctcattcattcttacgcaggttccccagctgtcagtctggagtccatgagctcccacttgctcaggtcagctgttactgtgggttttcccagcatgttcttgacccctttgctcatcactcttccctctctacaacttgattccaggagttcggctcagtgcttagctgtgtgtatctgcttctgcttccatcagctactggatgaaggctctaagatggcatttaaggtagtcatcaatctcattataggggaagagtatttaagggagcctctccactattgcttagattcttagtaggggtcatccttgtggatccctgggaatttctctagtgccaggtttcttgttaagcccataccagctccctctattctgcttttttatatgtaccagattattttattcagaaagaaaaatgaaatcacaacatttgcaagaaaatagattggcttggaatgtatactgttaaatatggtcagccaatctctccagatgtggatcctagactataatgtgtgtaagtatgtatgtaattagctggtagtgtgggtatattacacttattaaaacaccaaagagggtcttttcaggtttactggatggttttgtgtgtcaacttgacacaagcttgagtcatcagagacgaaggagcctcacttgaggacatgcctccatgagatccagctctaaggcattttcttaattagtgaccaatgggagagggcccagctcattttggtggccctaaattctataagaaagcacaggtcctgactgagaaattgtggtctctctactcttccccatgtttttccatttccttctctttccttgataacctggcttttgccagctgttctttcctgagctttttctcacctcttgtcctcattattcaacctaaagatgtggggtcagcaagatggctcatctggtaggggtgcttgccccaacattctttttaatatttattaaacatgttattaattattaataattaatatttttcttacatgtatgcatgtgcaccaggtgtatgcagtgacactggacgccagaagagggcatcagatgccctggaactggagttacagacagtgtgagctatgagggtgctgggaacaaaacctatgtcttctgcaagagcagtttaaggttaatttaggacacagaagactctgtcagaaaaaagaaggaaggggtgaggagaaggaagaggaagaggtggagaatggaaggggaatagagagatggctcagcaatttcaaaaacattgctattttcagaggacccaagtacagttaccagcacttacatcaggcagctcacaagctcctacaactccagctctagggaatccaacgccctcgtctggactcagccggcacctgcacatgatgtggcacacattgccacacagagacacatacttgcataattctttcacacgtttttattttaatcattaaaaacaaaacaaataaatagtggggtaacataccacctccctgtcctgtatccctcaggatattagagaggctctacataaagaaatattgctgtagactacagcagtcagaagtaaaggtaagaagcccacctgctctcggaaccctctcacgcccttggttcagatcctctcctgctaagacctcttcccaccccactacctgcccccactggtgtggccctgcacccaccttgggcagataccagttgctcaggtgctggccatgccagtcaagctcatttaccctcagaaccaccagctgtggcctccgttgagatctgaaagacccaagatactgacaccctgctactcaggtgcaggccacaccaggcagaagaacaaaaccccctactgtgccaaaggccacactagctgccagaagtcagcccccacctctggcagagactccagctagacctcagttcacaccagcttccagaaatacagaacacaaagaccagaataccaaagaagaaagagaaaccaagggaggaaaaaaaaaacacccttccaacaaagaaaaactcagaaatcagcactgtggtagtttgaatgtaattgtcccccataagcttatagatgaaagaccccgccccttagctttttctctctcggtgacactcccgtacgcgcgcgcacccacacgcccggccgccggctccctcccaagctggttcaccccagcggggcccgcgccccggggctggggccgagcgaggagcccgagaggcggcgagagggcgccccccccccgcgcccccgcctgatggggaacgctccatcccaaggtcagccatctggacgcggagggagataagatagagccaaggccgtttcgcctgattaccagaccttgagaaaatgctgacttgaaataactctgtacctcatttaaattgtccaatagaatccctgtaactatgcttttcacttctgcactgtgctttttgctatataaggacccctctcccttggctcggggcgtgcttggcctcacagaagctaagttgccccgggtacccgtgtatccaataaagcctcttgctttttgcatccaagttcgtggtctcgctgattcctgggtacgggtctccttctatgaaagtacctcttcgggggtctttcaatagaaagtggcactaataggaagtgtggctttcttggagtaggcatggccttcctggaggaagtgtatcactgtagaggacagctctgagatctcatatatgctcaagccacacccagtgacccagaccacttcctggtgcctgcagatcaagatatagaacattcagctccttctccagcaccacaccttgacacaccatgatgataatggactaagcctctgaaaatataagccatcccattaaaccttacaaattaaatcttataaatcctttgtaagagttgccatggccatggtgcctcttcacagcaatagaaaccataactaaaaccgaagttggtaccagggactggggtattgctgtgataagctagaccattttttggactgaagtaatatggactttggaagtttgggttaggaaagcaatggaatgctttaagcactgattaatggccatgctagtaaggacatggagacagtagtgctaagatttattttgaactgtgagggcctggctcaagaagttttagaggagaagaatattaatatgtgacctagagatcatccttgtgatattttggtgaagaatgtggctcctttttgcccttgtccaaagaggctaaggctaaagtgaaaagatttggattaaatctgctggcagaggaaatctcactctgttgtgaagttattatcggtctctcttatacagatttgtaataaaaaagagggctaagtgaaaggttcaggctttaatgctgatctgctctacctctttaagagacagaccccgccccctgacaacagtcaggacacccacaagaaaacgtgctatgtcatcaccacgtcacctgccacgcatgaagactctgggcatgcatggaaccccagtgcgcatgtgcagttccctttaaaagctccaacttccctgctgctcgctctttttatactgctctctctctgctcactccttctctgctcttctcttctcccacctacgccctctctgactctctatggagacgggccatggtggtcagccattacccctgttcctcttctctcctttagtctcactactctgcagggcatctaataaactggttagcatgtctcatccatctcttttcctctttttaaacaaaaacgtaacactaagaaaggaaaaatacagccgggcagtggtggtgcacacctttaattccagcactcgggaggcagaggcaggcggatctctgcctcttttgagtttgagaccagcctggactagttccaggacagcttccaaagccacaaagaaaccctgtctcgaaaaaccaaaaagaaaaaagaaaaaaagaaaaaaaaaggaaaaatacaaaatgtacaatttgaggaggaaaggagcaccagtgtcatggcccagcatgtttcatccccaagccacagcagccatgaggttcggcctgagtgggggagcgtggacttggaaactcctagcaacccaatggcgataaagaccaaacacaggcatattgtcatctcaggagagctctcagttccatgctgcaaaaactggagtctcttgtttattcagcattttcttggctgttttctaatcatgcttccatgaccacaaggtcatttctctccttctgacccctctctctgctctatggctcctcactctctcctcacttgttactcacacacctaacctcccgcccaggtgtaggcctattcagatgcttagtcctgtagagatgcaaactaggggacattctacactgaagctatgctatacaatagcagacttgctctcattagcaaaacaattgtaggccagagttcctgggtgctcctgtttactgaaaccggaggctggaccttaagatattccataatggaatttttttggtccccaacacaccaggaagtgaaatagagttaagtctggggttcaaagaaatacacagattaaaaaatagaataaagagagtgataacatcagagcaagatcccaccaagctaagtttaaaagcttagagccaggagtggtggtgcatgcctttcataccagcacttttgaggcagaggcaggtggatctctgtgagttcaagatcaacctggtctgtaagagctagttccaggacaggctccaaagcaacacagagaaaccctgtctcaaaataaaatccaacacaattcttttggaaggacaatagtcagcttcatatggaaaaaaaaatgcaggatagctaaaacagtcaataaaagaacttccagagatatcaccatccctgatttcaaactgtactacagagccatagtaacaaaaaaaaaaaaaaccacatggtattgccataaaaacagacaggttgtgtaaagggccgtgggccttgaactatatggtttaaagcccacctttgtaagtttttttatgacctttaaagtttgtggcttaaagccagctctgtgagcctcctgtaacctgtaattagacacaatttggccaagcaggactgctaacgactgctgttctaagaaaaggcgtggggcctttctgcctgctgtttcgaagataccgcaagaatgttccagccccagcaaataccagacgttccttcctgctattccccccgcttgcctaacttcctcattgcagggctatataagcccactctaagccccaataaatcgaggccttgacaatgcacagatggactctggtcccctcttttgcgccgcttggtctccttcctttctcttgcccatgactctttcaggcagccccccttcagaaccctgaatgcctggactctcgggacaggtcaatgttgatcaatggaattgtatcaaagacccatatacaaatccacatacctactgatatctgatttttgataaagaagccagaaatatacaatggaaaaaagaaagcatcttcaacaaatgatgctggtctaactggatgtcagtatgtagaagaatgcaaatagattcatatctatcaccctgcataaaattcaagtccaagtggatcaaagacctcaacataaaaccagttacactgaacctaatagaagagaaagtggggaatagccttgtactcattggcacaggagacaacttcctgaacaaaatactaatagtgcaggcactaagatcaacaattaataaatgggacttcatgaaacttaaaagcttcacttctgtaaggcaatgaatagtggtcaatgggacaaaatgacagccttcagaatgagaaaagattttcaccagctccacgtctaacagaggtctaacattcaaaacatataaaaaattcaagaaacacttgagtgatgggggaatatccttctgtatatatatatatatatatatatatatatatatatatatatatatatatttctcttattggttggtgaataaaacactgattggccaatatccaggcagaaaggataggcggggctaggagatgaggagaatgctgggtagaggcagaaaagagccaccaggcagagacgccatgtagctgaggaaggagtaacaggtctggatctttctctaagataagatcatgtggaaatacttagattagtagaaatgggctaatagttaagagagatatccggtaagaagcctgagccatcggccaaacagtttctaattgatagaagcctctgtgtgttcatttggggctaaccgactgtgggaccaggtggaaagaaatttcagctataattgagaactcaagaaactacatataaacaaactaaatagtccaattgaagtgggtacagatctaaacagagaatttgcaacagaacaatctcaaatagctgagaagcactttaagaaatgttaagcatccttggctatcagagaaatgcaaaccaagatgagattccatcttacacctttcagaatggctaagatcaaaaacacaagtgacagctcatgatggcaagaatgtggagcaagaggaacactcttccattgctagtgggagtgtaaatttgtacagccactttggaaatcaattatggtggcttctcagactattgggaatccatctacctcaagacctataatactcctgggcatgtagccaaaggatgctccatcacaccacaaggacacttgctcaactgtgttcatggcaactttattcacaatagcaacaaacaagatcaacctaggtgtcactcaaccaaagaatggataaacaaaatgtggtaaatttatacaaaggagtattagacggctatttaaaaaaaaatcatgagatttttcaggcaaatggatagaaatagaaaaaaatcatgatgaatgaggtaacctaggccaagaaagacaaacatggtatgcactcacaggtgaatattagctgtaaagtaaaggataatcatgctacaatccatagactcagacaggcagagtaacaagaagggttcaaagggacacatgggccgggcattgatggtgcagcctttaatcccagcacttgggaggcggaggcaggtggatctctgtgagttggaggccagcctggtctacagagtgagttccaggacaggcttcaaagcaatacagagaaaccctgtctagaaaaacccaaaaaaagggggggaggaaacatggatcactctgagaataggaaatagaatagattttgtatagccagatgtggggacccacacctgtaatcccagcatttgggtgaatttctgtgagtttgaggccagcctggtctataaggaggtttccaagacaactaggactattccatagagaaaccctgtctcaggaaaacaaaaagaattgatttcaagggtgggaacagaagggattgaagggaccagctccccattttggcagccatgacagtaacacgtgctcactatgaccttgtcttagtcactagaggttaggtacctgtctcataacaaggaaccaatcagaagttagctggtggcgctatgctttacaaccctgggtatactttacagacaagcacacagcaatgatgcacaaagaatagcaaccaccctgggagggcctatgggccataacaaccagttgaccaatcaacacagggcaagccctccaagcctggaggcacaccaatcgtgagcctgtgcatacccctagacactccccttacgctgccctacaagatctctccgcagccagttcaaactgtcttttgtagccatccgccatggcgggtggacaaaagacctgagctaacatggcattagctcgttaaattacaataaagcctcatgcagtttgcagcaagctctcgaatctgcctggtgattgaggtgaccagggtcgtggcctgggaccccgatacctgagttttccgggggtctaacaggatcaggttggagggtgaagggcgaatacttggagaaatgcctggaattggggccatttcaggtgaggtagaaacctagtgcagtgaaaactccctggaatctacaatggtgactgtggtggtttgaaagaatagtgcccccaaagggagtagcactattaggtgtggctttgttgcagaaagtgtgtcactgtggggggaggtttgggggtttctttcccaaacttctttcatagtgacagtcagtccacttcctgttgcctgcaagatgtatgactctcatcaacttctccagcaccatgtccacctgaacgctgccatgctctgcaccatgatgatgatggactaaccctctaaaaatttaagcagctacccaattaaatcttttcctttataagagtttccatggtcgtcattgtggaatattcaatcacactgtaaaccctgagtttgtgttaattaaatataaccaaccttgggtcaggaagctgaattagcagctagttgacagaaagtaatcatagagagtctagggtgtctgaaggatgatagagagatgcacagaaagtaggagcggggacttaatatagggtggatccttttattgtggcgtagcaggaggactcactctttggagatgctggcaaagacagatcaactagttgctactcaacctctctgagcaagcaggttttcaccccagtctttgactcccaggtcttattaataaatggaatatatagatttaattaaaagctatgtttggcagcatcgatatagccagtgcctgtggaaacagaattcctactaggcagtggctagagcagctgggccactggcagagaagcaggccagtaactgcagaaatgcattttctggctaaaagtagattgaagttcagcctctttgctgcctgaaaaacaacagggcatggtgtctcttcacatcgattgaaaccctaagacagtggccctagtgaagacacctagtaatagggaataaggatcctgaactcaccattttctgtaacctttgacctataatttgtcctgcttacaagatgtgctggggtaaaggtgatacagaacttgtgagaatagccaaccaatgactagtccaacttgtaatccacgccatgagagggaactcaagcctgatagtgcctggagggtgaagaaccagaggccggatagcccagagagctaggatagaaccaaacatgactgggggtgaaaagtcaatgaaatgattcctaatgataccctgctatactcatagactggagctgactataatcatcatcagaaagttttcatccagcaaatgatgagagcagatgcagaaacacacagctaaacattaggtagatcttggggaaccctgtgctagatggggaggaaggatcgtaggagccagaggggtcaaagacaccacaagactctcatctacttctccagcaccatgtccacctgaacgctgccatgctctgctaaccagaggcaactaaccaggactcacagggactcacagagactgaaccaacaatcagggatcctgtgtgggtctgagctaggtcctctgcatgtatgctatggctgtgtagctttgtcttattatggggctactagcagtgggagtggagggtgtctttgactcttttgcctactcttgggacccttttcctcctactgggttgctttgtccacactttatatgaggggatgtgcctgctctcgttgtaacttgttacgccatgtttggttgatagccatgggaagcccacccttttctgaagggaaatggaggaggaatggatctgaaggagaggtgggtaagggagggactgggagggcctgggaggagaggagaggctgctgtcaggatataaaatatgagagaagaataaaatttttaaaaggagtattgctatatcaggattcgcagtcctgatatgtgaagaacaaccaagcagaggagcagaaactctttggaaatctgccatccctgaacaaaaaggattcatgaagacaccaagcctgcaatgaacatgatttattttcctttcctgtgtcattggcattctagtaactcggtaagattttctccgtgcatgtgagcctacagattggaggagtctgggtcccacaccacaaagttctcaacggtagaagagaagcacagcagcttcagttatctcccggctactgctgtacgcaacgtgagttccgtatccattccaatcaaatgccgagaagtcaccacactgccgagggttcccttctggaaagaatccccctccaccgatgcagtgctggaaaacgaggaggagatgaagtagcaatgagaggtcagctggtgatatggtttggatatgtagtgccctgcccaaaggtgctatgtactaaaaacctggtccccagtgtaagtaacattcagaggcaggactttggggaaggcttgaatatgaggaccctgccatcatcagttaactaatcactagtggagtcaccattttaaactgactattgggaggtggtgaagctgggggtgggtggggtctggttagaggaaacagaccactgggagaggaagtgtggtgtgtgtttgggggtggggtgtgcgcgcacctgcatgacacaaatgtacggatgtgaaagcagaagttaggggcaacctccagaaattggtccttgccttcccaccttgtttgagacaggttctcttcaccactgtgttagtcacgttagctgacctaagagctttgggagggtcccctgcctctgtctcccatccctctctgggggacactggaattacagacacccccaccactgtgtgcagctattgtatgtgttctagagatatgaactcaggtcaccagacttgcacctcaagtacttttaccatcttctatgccatcttcctaatcttctcagccacaaagaagcatgattttgaaggtgacttgccctggcctttcacgctgtatttcagcttcctggccactattcagtaagccacactactctgatatgcccttcctgtagaatgtttctatctcaccatggatctgacaacaatggagccaactgaccacaggctaaaatctctgaaagcacaaaactaagtaagagtttcccccttttaacctgtttctcttgggtattaaccacagaggcaaaagactgactaaaacagtggatgagtccaaagacaccttaataaacatgttcagtggattctccgtcccatgtcagactctccgttggcagtattgccctatttaatccataaaacccgtttccattggctttaatggcatcactgtctcttcctagctttccttcaacttctctgaacctttgtactcaggttccctggttagattttttccttcatgaattccttaagcgctaattcccaaagggggcacattttccagtcccttgaagcttgtgtcagttaaccaactattcactgatggctcaaactgtctatctccagtccagacgtttcttgagctaaagttcttaaattcatctgccactcaaatcactattcaggcatttcaagctccacttgaaaaacaggattaatctgggtgttggtggctcacacctttaatcccagcactccagagacagaggcaggcggatctctgtgagtttgaggccagcctggtctccagagcaagtgccaggataggctccaaagctacacagagaaaccctgtctcaaaacaaacaaacaaacaaacaaacaaaaaaagactcaactcagaaactgcctttcctataaactgggtgtggtgtcacatgcctgtgatcctggcactagaaagttaaaagcaaggtcatcctgcctacacagtgagtttagaaccaacctaagatatatgagacctgtctcaaaaacaaaaatcctttcctgcagtctgtactctgcctttcccagtgcacatgtaacccctagttattttttgtttgttggttaggtttggtttgtgttttgctttctgttttatggcactaggaacaaaatcctagggccttctgcatgttaggcaaatgttttaccactaagccatacccaagctccttagtttatatttctactatacttcaaacatatcagataacaattacacatttgtgtgaatgtctaaacctatcaagtgctagcaagtacatggcatttcatgtcttctgtaccattacagtgtaggtgcacaaagcaaactacgctaaacaatacgcaaataacacactggcacctgtgcacactacattccgaagtcttcagacatcactgaaaggtcaataggaaccagattttcagagagaccttcccttccatcatctctatactcatcactctccatcacaatcagggggcttccttgtcagcaagtcttcctcatcctatcaggagaattgatgctgtgatgaccaaggaatgaaaaaggaaacagggccacctgacagggactgaggacccttttctgagactgttactttgaggaggtctgggttccaagagaatcttattcttggcaattcccacctcattctgccttttgccacaaagtagaaaaatagataaataaacagaagagtctaatggtcctaggcttaaggaatatcaggtagctgcagtggaactgagtgtacctgacctcaccgtcagtctacaagctgacctctaaccagaggaagtacctgtgatagggaggagaacagcctgggtgaggtctaccagatgtccaaaactcttctagtaatccttccacaaaataagcatctgtacaaaccttgaaaaggatatagttcactctgaaagctaaaccctcagtacagattgacaataccttgtgactctctagcaatctcagcccccaaaggtttccacatgacttcctgagtatgtgtcaccctgactccaagtaactgagtgtttatatcctaaaagctaaataaacagcaacagtgcattagaagttgtaacattgaatttggtcttcaatgagacatgatatttgtatctagacaggagttctgatccctgagaccaagtcaagtccaatgaaaggtcacactcctaaacacatgctcatactaccatgacagtctcctatgctcaacacacactaaaaaactcagtcttactcacaggcccacttgatccctaacaacactcattcatttggagttagagaaatggctcatcagttcagaacacttgctgcttttgcagaaggatccaagtttggttcccaagcacccacgtaaggaatgtcacaaccacatgtactccatttccaggaaatctaacaccctcttctggcttccaagggtacctgtatcatacaagatgcacataccaaaaacaatcatagaggaatacacataatttaatttttttttttttttggtttttcgagacagggtttctctgtggctttggaggctgcctggaactagctcttgtagacaaggctggtctcgaactcacagagatccacctgcctcccaaattcccaaatgctaggattaaaggtatataccactaccacccaatatatacatacatacatacatacatacatacatacatacatacatgatttttaaagactcacaatttcagtattacatccagtgaccttcatgccagcacacaaggcattggctgctctctcattattgaacactctaaactgaacaaatcctgcagtgaattcctctgaaaagaaaaagtagaaaacagcattcaaggaagattctagaaatactagtcttaggtcaatgcagagatggccagtaccaggcacagattatagttcaacacatcagaaatactgggggttggttgtctgacactaccatgaccaatggctgaaacatcccagccacacatggcactaacaggagccttttccaagtctgagagtccaagagtgggtggtcaaaaagaccccagtcttctgaaggcttgtatgaagaactttagtaacccaggatgatcatactgacaacttccgatggaccaccacgcattagcaagcgtattgattgactctggtcctatcacactttgcttgttccctttcattttcaacttttaaataccaagcataaatgacaagagctttaaattacacagcacatgttcaacctctatgaaggatattgcctcctttggatttatattaagtcacccctcacaacagaaataaacctccatttttttctgttgttctactcccttttgctctgttgttccgccccttgcacatagacctggcctgttcctgagaaaccactggatgatatcacggttgctagaattgattatatagccaagttttcccagtgcaaatgccaactctcatactgatgccttgtactctcaggcaagttcctggaccttcagagccccagtctcctaagctgtaaaatggatcagtaatagttgagagctcaagtgttatcatgtacatgaaatgaaacaaagcacaaacattcagagaagagaatcaggcttggcggatggtgaatgactgttacttataactgaatttatcacgtgtcctgcagagggaacacaggagtattaaagactcactctggccataaggggagtaataagaggctgtcttctgagcatcaccaaagtcatagaccacaggtaatgctgggccattgtcagtccaacacttccctcctccatatttcactgggtatctctacaaggaacaaaagaagtcactgggtaagtatggcagcattgacaatcccaggaacactgccctgctcagaaagacacagcatttgtgcagtaagtgagatggttgccaaaccagtcagataagaaaggatcatttcatttgtctgtgtctctctgacacatccctccctcctttctctctccctcccttcctctttctctcttctcttctctctcccctccctacttctctcctctcgtctcttttgcgcctacccctaagctttgactatcttggctcattgcacttagaattagtgaaacaaggaatacaacccacccagtctccaacacctgcctctctctccacacccatgagaagagcctcagccagcagtcttgagtacctggtacaggccaaacagattatggcccaggtgctgcaggaagccactgaaggtgcggtacctcagcagggagctgttcctccaattttgcagggggctattgttgggcacatgccagatccccaggttctcagcctggatgtcgtagtagccagggttctggaaagcaaccaacactgagcctgacaagaccaggagatttcactaaggaaagacccacatgcacagtcctcagcacagctgatgtctctgggctccagggggacagatggccagccatgctcagatggccccattcccagtgacaatggccccaccaccacacctacttacctaaaagactacttgggagggatgttgagattcaagataagtattttcccttcctcatccctatgttgaagggcaaccttccaccctctccctggcacgcttgatctacacaaacatcctcatgctctcccaggtggctacagagtgtaccaaccttgtagtcatcacttgtggccccctctgcagacccaaaggtgttgtagttggcccagttgccatccccctctgggctgtctgctctgttgccttgctgactggaccagcgatcgcccactgtgcacttcccatacatgttgttctcatgcacactggccaccagggtccagccaccacctgcagtggtcatgtcacagaaggtctggtagatgacaccattctccgtgtggaggaaatagagaccatctgtagagagaaccagttcacagtctcctgtgtgcaggctcattgtccatctctgctccagcagcagaatggctctaggaactacgaacatggtgaatgcctcataccctgagtgtcctatcacaggtgttcctggggatgtgcctgagttcagaaagccaagcgtctatgactgaggcagaacacagaattacccaaagtgacagtgatgtttttgttttaaagttaaacacagtattatcaaaggacttagcagctccactaggcagatacccaaagaactgggaacagggactcagatatgtacattcgtgttcattacagctctggtcacaagacctgaaaggcagaaacaagtgaagtctctctacagaaaaaggaataagcaatatcgtgcgcggtctactatgcagaatatatatattgtacattcctgtattccaatagataaaaaaagaatgaagtagactggagaaatggctttatttttaagagcaagtactgctctagcagagaactttagctaggttaccagcactcacactgggcagtgtacaagtgcctgtcactccatctcctgaggactagatggcctcttctggactctgcatatacctgcacacacatgcacatattcccacacacagatgtgtacatcatcatcatcgtcatagtaataataataacactaaatctttttgagataaacttaccgttctacaacacatatgagccttgaagcatgcacatgaaataaggcaggttactcatatgtggtaacaagaactaacagattcatagaagtaggaaacagagcagcagctcacagagaatacaggtatttattattttctggctacagaatttctacttaaggaatgaaaactttctggagatggacaatagtgatccctgccattgtgaaagtcgttcttgactctgaaaacccttaaaattagttaagtggcaggttttgtcctctctacattttattatattttctatttcaaaaaagaaaagctgttccatgagacaaaaaagctgatttcctaactgggtcatttgttggtattttcagacagggtcaccctgggctggcttggagctttcagtccttgcttcgttttgaggtgttaggattacagtgtgttctttaaacgcttcatcacttaccttgtgccccagtcatctcctgtttgatttccttgcagcttctgaacagagaggaagacacaggattggcccatctgttggtatccaggttctcttgagctagagaagatgcagagtttcactctcgtgggacacccagcctccccttgtcattcatcctaatgacttcccaaagcctccctctgagaatcaacaagatttccaactaggaagagagaagacaggtttgaagctggagaacttagcgtccaaagccctgaaaaaggagaataacttgaagtccagtcgcagggagaagaaatgcagggaccctaatgtgcctgaagcatgggcagccaggttggcagtgcagaggcttgaccaggagaccatggaatagaaagccctgcgaaccagcctcaaccccacaagtcctctgagaacctagaagcatggaaaccagtgagagctttggggtctgagctgctcaggtgtaagtagtagatccaagtccacgagtcaagtatttttggatcgtatttactgtgtagcctcagttccctagtgtctcatatcaagctgacaaagatatcacgtggagattaagtaagatggcatttagggtcttgcccttttgcttaaagacactaaagcagcagtgaagaggaagtgctcatttaaaaataatgttgagtttctgtagagagaagaactgaagacaaccttgtctgggcacaaatcagaccattcacttggcattgaaactccaaggccaaggtcctaagcataggggtgactaggatggacacagttcttacagaagttcccctagagctacacacaggcacagaatctttaccaaggcatactcaacaatctgactgtcactggccaattccttcaagaggcaatcagcatccagcctacatttcaatggcatcatctttgggggatgaactagattatgttcatatgtccagaaatatatatccacaattgaaaaaaaagggtgggggctttattagagtgagagggataattaggaaaggttggaaagaaaaaaggaattgaaaaataatacaattatatttaatttcaaaaagttatttttttaaaaaggcatgatcagtcgagcagcagtgatgcatgtctttaatcccagcactcaagaggcagagacagacagacagatctctatgtttgaggccagcctggtctacaaatcgagttccaggacagccagagcttcacagagaaaccctgtttttgttttgaaaaacaaaaacaacaacaaaagaagcatgatctctagccctcagagactcaggtcctggaagcaacctagtctagtgctgactgccttttcttttttgagacaaggtttctctgtatagcttaaagctaccaggctggcctcgaactcacaaagactggcctgcctctgcctgccaagtgctgggattaaagggatgtgccagcaccaagaaactgttaattatctttaaagctcacattgacctagggaagctggctggtcctatataaagctggaagtcctatagcaagactcacctgcagtgcagcctctggtggccacaatgagaaacagcaggaagcccagttgagtcatggtcatctagaaaaaggcaagatgaaagtcacttctatccagaccatctttccctttatcccagtctcacctcctacctagtccttcagctactcaaaggcccctctccctttacttagctcaacacattttggtcctaacagtgacaggagccaaaatccttgacccccctgctccccaaacagcaaccaccttcccctgtccctggcgggagctaagcctcactgtgatgacacagggctttctctgctgaggagtctgcctgtatgtgggaggctctggtccttttatagggaaagcccagtgggacataaacttacccctggcaggatgcccaatgtagatacagcctctgtgtattgtagggtaattctgagattagcaggctctaaacggcaaatattaagtgtggtttactagtagcattctcagattccaaaaagtgatgttgggttttcagtttttctttcctgtaaataatacctttctttaaaaaaaaaaaaaacaaaaacaaaaaacaaaaaactaacatctaccataatcatcattcaaaggaaagggaaatttttgccagtgatggcagtggtggccattttttagacaaggtcccatgttacccactctggttcaaactcacatatagctgaaaatgtccttggactccagatccttctgcctctacctgccaagcgcttgaattttaggtactagccatcaatcctgggtagaaaaaaaagggggggtgtaaacaacagcattgtaaaagaataatttctgaataaatatggacattttgcttgaataaacttattaactattttgtccttaattttctcatatctgccacaaactagtaaatgttaccataaactgcactggggatttactctatagaaaccatctctgatgatacgtcaatgtaaaccccgcccccagcattcttcagtttacacacacacacacacacacacacacacacacacacacacacacacacacacacacctggggctataatggaattatttgacttctgctcagtgatacagcacccataatccctggcttcattttattacactgctagcatttcaagtccttaggaaaagattgagtaagttttgtgtctaagccatggttttcaccttcctaatgctgtgtccctttaatacagttcctcatgctgtgatgaccccaaccataacattattttcattgctattccataactgtgattttgccactgttgtgaattgtaatgtaaatatctgatatttctgatggccttaggcgaccccaatcctccaggagtcatgccccacaggttgggaaccattggtccgagctaatattttctgtattttaggtttaaaagactggtttacacaaaatagtcaggtatgttgatagaataaaataaaacaagggcatgtggctttcttggtagcattccaagtcctgggggttgcatcccccgtgctgcataaaccatgtgtggtggcacaagtctataataccaaggcttgatgcatggagaaaggaggataaaaagttcaatgttgacagggtcgttcagtgtcacacgacagagctgaagcacatatgaagtcacaggatggtgacagcatgcacaagacctgggctagtgggttttattgttttgtttctattttttgagattgtaatataataattacatcattttcccgtttcccttcctgtgcactccacatcactgcctttctctttcagattcatggtctctttttctttagttgctgttacatacatgtgtgtatgtttgcatatgttcctaaacacattattacagctggttcagtctgtataatgttgcttgtatttgcatgttttcagggctgatcatttggtattacatagccaactggagttctcttccctagagaagattgtttctccagctctctgttgtccttagatgactgcagtcttttgactagggttgaggcctcctgagccatctgccttctacattagcatatctatcggagtcagacttgcttagattgtgtttaggcggccatgttggtaagacctcatgggtggagcttctgacattcctagaagacaatctccctgttcctttgactttttttttaatatatgtatgggtgttttgcctgcatgtttgtctgtgtgccatgtgcacgcagtgccagcagagtctagaagagggcgtcatatgccctggaactagagttacagacatttgtgagctgccatttgggtgccggaaattaaaccagggtcctctgaaagagcaaccagtgctcttgaccactgagccatctctagccccctcctttgactcttataatatttccactccctcctccacaatgaaccctgagccttgcttagctgcaggagttgtgttgctgatgtatccgttgggactggattctataacccttgcttcttgactggttgtggtcttctgcaatgatctctgtctgttgcaaagagaagtgtccttgaggagagataagaactacacttatctgtgaatataaggacgaatatttacaatgaacttggggatttaaagtgctgttttaataaagtgatggttgtaggttctcttccaagatctccagccctggtggttggtggttggttatgtttccagtaccaggcataatttccctcttgttgagcaggttttaaattccattagagagctgttggttactgccaaggtagatgcaccactattgcacccttagggttattgaaccaagctaggaactgttgtggttcacaggcatcacagctgagttgaactgttggttgtggagaggaggaagtgggggggggggagaactgttggttgcttccctcctttggaagtttgcatggtgcctcctcaaaaggggaggttttcagatcatacccagctctggttttttgttggtgttgttgttttttattatttgggaggatttcattttgtgttgcgttgtgtggtacttttgtgagaaagagaaagaacatggaattgggtaggatatgggagagcctgggagaggggaaagaatatgatcaaattatactgtatgaaaatttcaaaagaataatttttaaaatataattatttttatatatatatatattatttatatattatatattatatattatatatttatattatatatattttttatattatatattatattatattataagggacatgtggtgacacacacctttaatccaagttctggggaggcagagggaggtggatctccgagtttgaagccagcgtgggctgtgtgtgtgtgagaaagagagagagagtgtgtgtgagagagagagagtgtgtgtgtgtgagagagagagtgtgtgtgagagagtgtgtgtgtgtgagagagagacagagagtgtgtgtatgtgtgagagagagagtgtgtgtgagagagtgtgtgtgtgagagagacagagagtgtgtgtatgtgtgagagagagagtgtgtgtgagagagtgtgtgtgtgaaagagagtgtgtgtgtgagagagagtgtgtgtgtgagagtgtgtgtgtgtgagagagagagtgtgtgagagagtgtgtgtgtgagagagagagagtgtgtgagagagagagtgtgtgtgtgagagagtgtgtgtgtgtgagagagagtgtgtgtgtgagagagagtgtgtgtgagagagagacagagagagagtgtgtgtatgtgtgagagagagagtgtgtgagagagagtgtgtgtgagagagagtgtgtgtgagagagtgtgtgtgtgagagagagtgtgtgtgagagagagtgtgtgtgagagagagagagtgtgagagagagagtgtgtgtgagagagagagaagaaagagagagaaaaagaaaaaggaaggaaggaaggaagaaagaaagaaagaaagaaagaaagaaagaaagaaagaaagaaagaaagaaagaaaggaggaaatggaggaaggaaggaaggaaggaaggaaggaaggaaggaaggaaggaaggaagagagggtaggggaagaagttcaacgtcatcctcaacttcatagagtttgaggccagtctggaatacatgagaccttgattctttaaaaaaaaaaaaactgaatatgcacacaaagaaaatatagacttcttttagtattattaaaattgattccaagagattagaagaaaggatatgtgagccgggcggtggtggggtagggttttagttgatggggtggtaggggaggaccggagggagaagagaactagattgacatgtaaatcaatcttgtttctaattcaaattttaaaaaatgataaaaaaaaattgattcctagacccaggcgttggtggcgcacgcctttaatctcagcactccagtggcagaggcagaggcaggtggatctctgtgagtttgaggccagcccggtctacagatcaagttctaggacggagtccaaaacaacacagagaaaccttgtctggggggggaatgattcctagatgtgtttggtgatgtttgacatacttagtatcattatacatttcattcttactggtacgtaagccattgaagatcccacaagctaagagtctaagaaaacctagggtagttggaagctatcacccataaccaccagcatctagtctctgcatcccactgattctacttcctacttcctctggtatctgttcttcataccacctcacccaaaccccactgtccttgactcttgctttgttcagatctggatttttcagctgtggctaataggaattttatgtcaaactgtcttattttttaaaaagtgaatataccacctgatgaaatagtaaatccagaaagagtgaaggcttcaggcttccttgattgatgcagcaacttgtcttcatctttgagttcatgggctcatttaatctctacctaacttcatcctatgaattcaaaatgcttggctattatattgctgttccaggcatgactgcaaggcaatggagaatggcttacctcttcttgtggctcttaacccagagaccccccccccagcatgcctttcccattggccagaaatgggcacatgctacactgttcccatggtgcttctcatggagctgcctcactaagtggcctaaccactgtggatttattttcctgcatttctggagaactggaatccaagaagagtgtgacatcaggactctccctccaaggtctctgtgcctaacttgcagagagccacattcttactgtgttgtctcagtctctcctgtgtgtgtgtgtccttggtgtcttctctagtgctcacatttcctcttctgtaaaacatgccagccaagatccagcaagagagcttagcgggtaaaaacacttaccaccaagcttgacaacctaagttcaatccccatgatccttatgttagaagcagagaactgattcacacaacttgtcctctgatttccacaggtgtgccacggtacatgaatactcacatacatacttatgtacacagagagaaaataaataaacaaaaaaatataatatatattgttacgataaatctttccaccaaagccacccaagccccaccaccacgtatgagctttatgcctgccgaccgcccgagttaggcccaaatgaatacacagaaacttgacttgtattagtttcaaagctgcttggccaatgactaggatttttcatctgttagttcagtcttaattatcataaacctatatattttataagacttatcttatcggacgccttattggcgtccctccttgatggtggatcacatcgtgccgttgcagcaggagcggaggggaaaagaggacccttcctgtttctccttctttaaatatgaatctccttgctatgtcacttcctgcctggatcaccacttctctactacatttcccagaatcctctttgactcctagtcctgcctaacttgctgtttcattggccaagcagaactttattaaacaatcaataagataaacatacacagaagtacttcccccatcatctcttttctgtctaaaataaaagaaggataacttatcttttataataactgaagaaaactataaccataactatttgtcttcaactctatcaaagaccatggaaggatattatataaactctagaattgacagagacatctgctacctggacagtcacccaaagttcctctgtaacgttggggcatccatcttcagcctataggccacagtgtgtctgacacacttctccatttcaacaggaacccttcagtactgtcttgttttgtaagttcagcagtcactttcttgtgggttctgtatgtccagtttatacgggaacaaacagtccaggcaagagcagtttctttctcaaatggctaatcttgccatgttgaaagcaaactccataacgagtttctttgatgcccatcctcctttctgacgtaattggtgtgccaggagcagttttgtctctctgccaataaaaaccctaaaccatttaaatgccatatttctgtaggtctttgaaaggtttgaagaatacctatccatctcaaatacatctctgtatatctagaaaacctaactaacctaattataagttctgactattataggtaaaagatctgtataaacacaatacctaaacaagaggagacatatacatatcacaaaattgaccttaaagttgtatcaataaatgaaaatccataccaatgcaaagtattcattcctatatcctattccccttttctttctttaaaaagagattgtctatgctcattatcatttataactaatcccatttaaatgaaaacaaatatttataaacaatatttggggattttggcatcgttctttctaaactgcttcctgctgattgggggcgatgttcatataccatggagatcatgataaaacatagaaacctgaccaagtccttgtttttgtagtctgtaaggctgtatcgtctcagcttcagggggtcttgcttgatcaaaccatattagtctggaaggaatccacagctttttattttctgtggaaatacaagcaaaacctttatttctaagtaacctgtccttagacttaaattttgaagttgaagaatttttaaaatgtataagttggattaatttagcagcatttataataaaatgtattttagctgcagtaatatatttttaaacgcagtgtaaacctttagagttttttttttttttttttaatctggatctgtctttatcatcttgggagtgccgagtctaaaccccagaagcatcagggtcgggagggcgggagcatatggaagctgctccgatgcctctcagcggccggacagggcaggctatggcggcaggtttccctctttgtctgggaaccttggggcatggggttatcccgctcactgacaccaatatatattatatatattatttaatatatatatttctttatacacacacactccagggacactgtatcaagacccaccttggttatcttgttttcacttaccttattaaaaacactgtatctaaatataaccacattctgagacagtaggctgggcttccacataaaattgagagaaccataattcaccccaacacatgtccattcctgaattgatttctgaccaagggggggtgaaattgccccacttgccatgagctactcatctgggcataggtcagatgcttgtgagttttgtggcaaagcctctgttttgaacattcctcagccctcttctatctctagcattggttcactcaaattcttctgcacactggtgccaacaggaatccttataaaatgcaagccattatcatagtccacacctgtaatcccagcatatgtgagataggggtaggatgatctggacttcaaggtcatccttgtctacagggtgaattcaaagccagccagagctacatgagaccctgccttaaacacaaaattattgctataatcccattaaaagtactcctgtcacccagcagctaaagaaacaaattcaaagctgatatcttagagattgtatcattaactattgcaacaaaccactccacaatttggtgatttaaaacaggaatcatttcttttgtctatgaggctacaatttgagcaggacttagaggacatcgctggcttctgctgtgtttaacatctgctgggtcactcccatgctttccctctcctttactgtcaggacaggattttagggctgaattctggcacaactggcagcaaagcaagccaatcgctggtggccagctggttgcatggcggctgttctctccagtctttccctggctctctttggaactcacgtgtcatctagatcagtttccctggtagctgaaacctgcagctacccatgcaaacatgcagaacagaatcagaggtactaataatgtaactgaggaatcattgagtgtgttatagctactgttgatgatgagctggaaggtggagatgagagcaaggtcagggaggagaaatttctccctttctgcttaggctacagactaagccggacagagtttgagtctctgttgtgtggagcgacaagctggaaattttgtgcagaatgtgatgacaacactatgagagaactagtgccttggatttgatcccaatcctgagaagaaaaggggggatataaatgaaaaaaggaagcttgcctttgcagagtgatgctctgagtaaacttcaacttaacatcagtggtccctcatgttcaaagtgtgctgtgtgctgggggcagatctggaagtgtgtgtgtgccctgagggtggatcttcagaagaaaatccctccaccctcaccacctcaatccatcccagcatctgtatccccagatgacttgtttacacactctattgttcaacagacacaagcacataaaaagagtgagcacagacaaacacagagattactgaattacagaaaagcaaatacctctggatgaacagccggatcaagaaataaaatcttatctgcacctcagaaacatcagacacgttccttccccattacaaggccttgcctccctctaaagtaaacaccaggccaccagacatcagttccttgtccccatacttcactgccactgttgttgtgtgtttgtagtgtggtgtgggtgctttggtttggtttgatttacttgctttttcatttgagacaaggtctcaccatgtagccccggctggcctgaaattcacagagacccacctgtctctgcctccttgtgctgtgactaaaggtgtgtgccaccacacctggccccataagtaaaacagtttagatctgcttaaatgagtacacacaacacacacaagcccttagtgtttttatttggattacgttttatttatcatttcagaagaaatgttcctgatgccctctggctgctaaagctgaagaacacccctgcctctataccctgcaactccagctacagataccacagagttctgagtgctgcttgaaacacctgcccctcaacttcttccccactgcagaggaaataatcaattaaaacatgtttgcttgcctttaatcccagcactccggaggcagaggcaggtggatgtctgtgagttcgaggccagcttggtctgcaagagctagctccaggtcagcctccaaagccacagagaaaccctgtctcaaaaaaaaaaaaaaatgtttgtttcttcttctcctgtggtgatacattgtttatgatttattaaagcccctggagaccaaaatagcaaagcagccatattcattagctacagaagctaagtggtggtggtacacaccttcactcccaccacttgggaggtaggggtaaatgcatctggtagttcaaggccacactgaactatacgaaattgatcccatcctaaagagaaacagatcacacaaagatgatctcagcccttgggatcacacgtgtttaatcccagcactagggagatataaaaggcaaagggtctcaagtggagagttagtctctagccacgctgaggagagcatagtagtctgagggaatctgaggagcagtaaagtcaggagcagtctgaagatcgcccctttggtctgagctgaggtagtagtaagaactagtggccggctgctttgcttctctgatcttcagtttgaagcttgaaccccagcatctgtctctgagtcttttattttttgtgctacattctcctagcagagaaggacactgaactccgtggagccctaagatagacaggcaacaactctggaaggagatatcacctcagaactgagtaagattgctgaatgctttaactaactcatcctccagtgatgctggtccccagatggcatgtccagtcactgaccagtacacacgtcctctgtgttccatccctcctgctccagtgccattccactgctctctgagtatcaccactactcactcttcccctcagaggagcggcggtccccttcctcctgggtgtcgcctctttccttgtgcatagggttatttcagtacaatagcatggccactgttttgtttacatggctcctgtgacaattcctaggaaatgtttacaaagctgtacttgttaagccagtattgtaaaatttcacagctgcatagattaacaaaagagaattacatctgggtccaagaccagtgttcaaataaaacatatatttgctgtatacttagcactttactgtctctaatttgtgttcattcagtggcttatcacattttgcagtccatcctgcatagtacataaagcaatggtgcagttcaccgatgaagccttagatttggtgactgataattctgacatcaacagagagttgctataataataataataataataataataataataataataataataaaagaacttcctgcaagcctgaagactagagctcaaatccagggtctggtactaattatatacaactgattttaacgttgactttacatcctgaaaaaattatcattctgatcattgattggcagattttagatttttttttaagatttatttatttcttctatatatagggttttgtctgcatgtatgcctgcgggccagaagaaggcacccaatctcattgtggatggctgtgatccaccatgtggttgctgggaatggaactcaggacctctggaagagcagccagtgctcttaaccactgagccagctctccagcccatagattttcttttttttaagatttactttttgtgtgtgtgtgtgtgtgtgtgtgtgtgtgtgtgtgtgtgtgtgtgtgtgtgcacctcacacatacagatgcccaagaaagccagaagagagcattagatccgctgaagctggaggagccagattcttcctcatacccttccaccagtccataatatatgcagatgggttaattgaaatgcaaaagttagttacaagcctgagctatcagccacgcgtttataaataacattgtttccgagtggttatttgggagtggctgaaggacagaaacttctgactacatatgtatgtctactgtatgtgtgcctcatgctcaaggagaccagaaaaagcatcagaatccccagaactggagtttcagacagtttcgaatcaccatcaccatgtgggtgctgagaagattgaatccagatcctctggaagagcaatcggtggccttgaccactgggctggtaccagatagcaataccctgtctcaaaaaatagggagagagtcgtcaggtggtggtggcccacgcctttaatcccagcactcgggaggcagaggcaggtggatctctgtgagttcgagaccagcctggtctacaagagctagttccaggacagcctccaaagccacagagaaaccctgtctcagaaaaaaaaaaaaaaatagagagagagagatgggggagtcatagtggcacaggcctttaatcccagcactcaggattcagagatagaggccgagaatttctgtgagtttgaagtcacccagggatacataatgagtccttgtctcaaaacaaaacaaaaattagtcatgttgcaatgtggcattgactttctacatcaagccctatgtattcaggagtccatacctattgccttcatctttaacttgtcccaggccacttgttagtggtaccaaaagatcttcttccttgtactgttacagtggcataaggagtaatttaaacacagaaacaaaagggaacatggagatgatggaaataaacccaactgaccctaaaatcttccagaatagtccatcatgcctcatttcccaaaagtataatgtaaacaaagccactaagaaagaaaggcagctgggggctagacagatggctcagcaattaaaagcaatgacttcttccagaggacctgggttcaattcccagcgcctacatggcagctcacaactgtctgtaactccagttccagaggacctgacaacttcacacagacaaaacatcagggcacataaagtaaaaataaattagttaaaagaaaaaagaaaagcagttcctttgaagtccaccataaaagtccagacagtttatactcagataacactatgttgttcacaagtatacatttgaatgtggggggggggagtgctctggaccaaagacgttaaccctagggctgaagaggtgacccctgctacttggctgtaaccacttctttccatcaaatcttgaggtgcaggggaaagaatcatgagttcctgccctgtctgggacacacagtaaaccaaataaagcagggtgtgttggctcataccttgctgaggtaagaggattgctgtgagtccaaggtcagcttgaattacagagtgagaccttgactgaaaaaaaaaatcaacaactattagaaagaccggctgagtacttgaaatcttccagtcaactaactttaaatcctcactatatggactacctagaccctgggcctacagaaacaatttgacacattccttcaagagaccacactctagaaaggaaaccagctggggatgagtggggacaggatagttacagagactggcaacctgctggagaaagttgacactgattggacaacaagtaatgtctgcaagtcagggagaaaacaggatagaacactccagaaaaggaagaaaacacgtaagatgacataaagatgtgacagcataacccagaccgctgagaactgcaggtaggttgtatattgtaaggccagggcaagcaatacgagtgtctcctgaattattttaaatcctccccagctggcaatacagattaatcctcatagctggcacatgagaagaaacaagagtccctgtttgttagcaacactagatacccgctggggactatggacttacccccggggtttgtggacttcaaagagaactagaagcctccttacaaaggaagaagatgaaagccatggaaatctcaaccaatgccaaccctacatgatccctagactggtaagacaccctaggaaagtgccaattatgttaaagttcatgatgtgaaactgttctatagtaatatatgttaatggtcctattactgaaaacccatagttatttaaggtgaaagggccttcaagtgattttaaaaagtgtgcatgtcagtgaatggggggggggacaaatacagcaaaatattaataacagtgaacccaggtaaaggagttccagtcagtttcaagctacctgatgtcaatgctggggacctaactggagtcgtctgcaagagcaatttgtgcccttagctgctgaacctgttctgttgtaattttttaaaaagtggtgcaagagagaaagatgccacgcaacagggttcaagctgtgggggcaggcctttatgagggaaagagatcataaaagggggaaggggaggagggaggccagcttccagggacaggagcagtgggaggagaggagagagaggcagggggagagcggggaagggagggagggagagaggaggaggagacaagaggtgggcagggcgcttttaatgggaacacagtgaatgtgcacaggtggtgctctcagtggctgcagctgagggcgtgtcccgtcagaaccccaagggcaggccagtacagatgcctgaatactagcaatctctctagctctacttttgttttttgagacaagatttcactatctagctcagtctgccctcaaccttactgtataactcagaaaagcagtgaactcacagcaatctgcctgcctcagcatcctagagtactaggattacaggtatgtgccattattattagtctaaatgcattcttacttaggattaattcaataattgttaccacatttacatgtgcatattaattttttattatgtaaaatctctttgagtttatttcctgatcttccctgaatatgcagaagaagttggggacttttttgttttgtttttttaagaatcagtgatgctagcagagtggcacgggactctattctgggcactgaagaagagcaggcaactgaccaggagttccaggtcatcctcagtgacaggccggaggcacagagaatagaggctcacaccccagcactggaaagaggccaaggcaggaaggtcacccagagttccataccctcttggacttagtgatttccggatcagtctcataaacaagtaacgttgttctactattctccaatcgtaataaagagagctgaggtgtaacttggtgataagaggtgttgtgcccaatgttcaactccaagccctggacataagtaaacacaggggtcctaggttgcttacttactttcacaaaactgttgaacacttttccacgttattaaataatcccttattttatattagataagccttactaaaactcacagtccttctgtctcagtgccaccggtgccaggctgaaaagactttcagtgggattaaggccgcctccttgctgcatggcaggcaggcaggcgctccgccactgaactgagtcccagtctttaagaagatcttttttattaagttaaacatttttccctcactcacctcccaccctcctccctacccccacactcacaatttacgcaggaggtctttcttgtctttttccccttgctaggcggatccatgtaagtctctcttagggccctctttgttacctacgtttctggggttgtggcctgtaggctggttgtaaggacaagaattttttttaaagccgggcgttggtggcgcacgcctttaatcccagcactcgggaggcagaggcaggacgatctctgtgagttcgaggccagcctggtctccagagcgagtgccaggataggctccaaagctacacagagaaaccttgtcttgaaaaaccaaaaaaaaaaaaattcaacttttttgtttcatattcatacaatggagctaagaatggaacccactccctcatgcatgctaggcacgtgctctacaatgcgctctgcctataaaaggcgtactttgattttaattttttttgcccttatgcaaccctggcggcctggcactcgctatgcagaccatacaggcctcaaattcagtgattcccccgcctctgcccctacctaccggtgctgaaattaaagggcgctcagggggccaaagtcacgcttggaaattggaccagtctgaacgctcttatatctggctttcgccctgacccctggtggcggcccagcgcctagcggcaacagggacaaattcacggcacttccggaaaccgagggcgggcacgcggccactcgtcggtatttgcatacccacaatgcactgcactggggtagttacagcatttagcaatgtacttttttattattattcttactattccttaatttggtagatatttcataatttttatcttagttgaatgaagcagtcgccgcctttaagggagagtagttaccatcagtgaactaagaggtacagtcggccgagtactgtacactcgcaaggacaaagcatactctggtttctcttcagatcgtataaatctttcgccttttactaaagatttccgtggagaggaacaattctgagtcttagactaattttttgaggtcctgctcctggcgggactaacaatgatgtccaaaaaatagaatgttgttttccttaaatatgcttatttaagggaacaaagttaagtgagtctttgtgtttgataccctgagaagccatcaggaatagggggacttttgctaaaagtctttttttcagtattgtgtataatggggtccaaaactagcactacaggtgtttcaggctggggtataagctgaagtttccacttagaaacaatgtctactttaagattccagttactagggactcttgtatgtaatttaccacttttctggtatgagacaggaaaaaaaccacaaaaagattttagaatatagggatttagaaaaccactagcccacgcgaacctaaaatataaccaaacagttgtaactcagccttctgctgtgctgtgaccagcctgcctggggttcccaccaacgtgtttggaaagcgttttgatttatggctgtgtttttggttctgagctataaaagtttcatgagctataaaaaccccatgaaactacttcctgttagaacatgttattcaaggcaacccgaatctatgtttctagattatggtgctttgtatttggctcaacgaaaacgtttgaggggaaagctgtattgtgcatcgacactagatcagacgcagttttacccagagaagccgaagcaggtgcacaggtgggcaaagtcacggaaaggaaaccagacgccagagcctggctgggctagtgagcaggtaagaacggaagccacctgtcgtaatagggatgggctcgttaaatagtgctgcccagacaaactcaaaaccccagtgacttaatacagcagtgctttagtgcctgctagttcaaagtcactgcaggtttgcctgattctgcagggcaactgtctcccaaggagacagcttggcaatttcaccctgaggtctccggggctgcagaaggggtagatggaaatttctgtcttgatatgacttcccttactaggagcttctactctgttctacaggactataggccttacggatctgcaaaatcccgcagaccactcaatcccttccatctggaaatgaagtatgtccgttttgctcatagtctgttattcaaaactagtcaaatgtcaagttgcagctcaccctgcccccactactcttgcaattaggttttaccccttgtgggagtagaatccaaaaatgtcacccacaatctctcccctccttctatgtatgcaagcacttctctcatcaagcagtgggtgtagctaggtgtgatgtccctcacctttaatcccagcactttggaggcaaaggcagggaaatctctagttcgaagccaccctggtctatatactgagtccaaacaaccaaagctacatagttagctgtgtctcaaaaacaaacaaaaactgaggttctaatccaggtggctcacagccacctgtaaatccaattcaggtgatccaatgcccttgtctgacttccaagggctcctgaacacatatgatacacatactttcatgtaacataaatacatgggtattttttgaagatgtattaaattgaaacgagaagccattgctgtgaactgagttctttgtgggacccaaacgagatcacaccaaaccaaatagattaatctaaaaagttaaggaagcagttagagcccaaacacagccaagagagcctacaaacaagagattccagtctcccgagtcaccactggaaggaagtaccttctgctttaatccttagagaaaaaggctgtaccctcctgttaccaggcgaatctccccaccccacagtgttctgtttccttgtccctctctcaaaacccagatttgcccttgtccaacaggagctgacattctgctctgcagaaggaagaccccaccattccggagttcctaacaaaaaacaattagaggcttgtctgtccctccccggatgggtagaggatcgagcaattagttatagatgcaattggccctggatagcccagagccgtgctcctactaagtgcacatgcttctaccactgagccacactcccagccttggaaactgctgagaacagagtagaagctcctagtaagggaagtcatatcaagacagaaatttccatttacaagagtgtctcccttccccacgggaggtctcaccctcactggggagcagaagggagatgggatgagggttggtgaggggcatgggatgatgagagggagagggaactgggatcgatatgtaaaataagattgtttctaattcaaattaaaaaaaaaaaaaaaagtgtctcctctctgcaccaggaagggcagggtaactaaactttcatcaccgaagtgctgacttaaaactgcaaaaccaactttactgttactcacctgcttttcctggctctctcaaagacggtattttaaaaacctgaactctacgcctcctgtgtgaaacttactcattttttctggctgtttgccatgtatacatcaatcgaaaactacagctccctctccacccatggtttttgtcttttaaggctttggttacctctgttcaactgcaatccaaaaatatgaaatggaaaacttctagacacctaaaaggagttatgtttcaaatctcatgcaggtcccagtagcataaagagcctcacaccgccctgctggtctgctccaagacctgaagcattaagactgtcagggcatctgtggtgttgacatgaagaaacaacagtgtatagacatatatagaattcaatattgctgctacccaaagcacatacatctgctcacccagaaagccagtactcaggaggcaggagctacccggtaggaaatcaagtttattcaaggactgacactgagagaaaacggaggaggctggcacccagcccccaaaagagaccatctcaggaaagccaagtataggaaaggcattcttactagggaaggaaaggaggtatgctgggcgtgggcagaagaccctatgctaaggagtatcttcggccaggtggtggtggccacacacgcctttaatcccagcactcagaagcagaggcaaatggatgtctatgagtttaagaccaacctggtctacagagcgcattccaggacagccaggactacacagagaaaccctgtctggaagaacaaaaacaaacaaagtagtatcattagccatccctggtatccgtttttattttattttcttccgggttttttttttccttctatatggaacatcataattaacctcaacttcctagaactttttcctgtcctataattccttttttttctttagatttatttatgtgtgtggatgttttacctgcatgctatatgtgctccatggaggccagaagaggaagtcagatcccctggagttacagaggttgtgagctgctgtgtgggtgctgggaatcaaaccctggtcctttggaagagcagccagtgttcataacaactgaggcctgtctccacccctctgaatcaacgtattctcctgagcttcttcaatgtccatgtgggggcatctacagccttggcctcattacacagctgctggaggcacacagagacctcagggtcggggattgaattaagcctcagtcctcgagaagcttgtattcttccaacaatgcttcaggattatgtggagctccactatttcagagacttttgagaccaacactgatcccagagcagggttacccacatagccttgtatataatgtctccagagagtttgttgttcatgggcactcgagctttaatgaccagaaaagaactgttttgtggggggtgtgggggggtgggggggagtttgagacagggtttctctgtggctttggagccagtcctggaactcactctatagaccaggctggcctcagactcacagagattcgcctgcctctgcctccgcctccggagtgctgggattaaaagtgtgtgccaccactgcccggctaagaactgcttgtttgggggttttggtttggtttggtttggtttggtttggtttttggttttttgttttggtttttcgagacatggtttctctgtattgttttagagcgtgtaagaactgctttttaaacaggaaagtttatctgtgcagtccagactagccccagaacccagtctagcctccaactcatctttgtgctccagctttggagtgttggggttatcagcaggcaccgcctactgggcctttgttctcttacttaataagtgtataccccaaaatcataaattgtttcatgtttccacacgttcaccataattattattcaacaacaggataaaagtccatcggtctccgagctctagttcaacaatcaccttattgtgaagaacttggtgtctgtccagcttggtacatttaccaatcacgcgacaatgaatgtctttcacctgtgtgtgtgtgtgtgtatgctcttttctctgtttaattgtttcccaagggcttatccccatgagagccatcactggatttcagggtgtgaacaattttatggccactgaagcaccatgctctaatgggtcccaggaaggttgtgactaccaggccactcatcgacagagtgcccaaaagcttagcactttcccagtgaagatgtactactggctaggtttttgtttgggttggggtaagtggggttagtagtgttgttttgctgaacattaacacagggaaaaatggatcctcaatttaaatgctactcgcaattgcctgctttctttctgcatttcctaaagataagcagggacactggtacccctagaataggtgattccaaaagatgaactgccacacaggcttcagctgcttcagaccaaccttatctagtaagaatttttttgtgtgtgttttgttttgtttttttgagacagggtttctctgtattgctttggaggttgttctggaactctcaatgtagaccaggctggcctcgaactcacagagatctgcctgcttctgtccccggagtgctgggattaaagacatatgccactaacgcttggcctagtaagaaattaaagggcagattttagcaggaaaaaaaaaatctggataccatggtccatatttgtaatccaagtactcaggaggtggagccaggagaatcaggagttcaaggccagctaattaatattgagcttgaggccagcttggggcataagaaaccctgtttcaaaaataaagtataaacaaataaattattttaataaaatttttatttattttattgaaaaataatttgtattgttttgtttccagacaggctttctccatgtaactctggctgtcctgtaactcactctgtagaccaggctggactcgaatttacaaagatccacctgcctctgcctcccaagtgctaggattaaaggtgtatgccacaatcgcctggcataattttaaaacaaccattcagttataaagaatagtatggacacacagacacacataagcaggtaattaaaatgaattaaatatttaaatttttatttattattattttatgtattggagtgtttttgcctgcaagtatgtagactgtgtacgtgagatgcctgcagagcccagaagagggcggcagatccccgggaactgcagtaagagatggagccaccgtgtgggcgctggacacaagcgcttaaaccactgagccctctctacagccttcaaaccaagtggtttaaatagcagatatgtagaggctggtggggtggctcggtgggtaaggctcagaagcttgactaccccagttcaatccccagagcccacgtaaaggtaggcgagaacccacttcacaaagttgtcctctgatgtctgtttgaacagttgtgcgcgcacgcaaacataacacacacacacaaacacacacacacattttaaaagatagttcaagggtaacctctgtaacagatcaagttcaaggtctgacccacttgaacaaaaaacaagcccagcactctggagcctgagatctctgtgagttcaaagctagcctgtcctacagagcaagtccaggcatccagagctgcatagaggatcgtgtatcaaacaaacaaacaaggagggggagcacaaaatctcaagaaatgaaattcctctttacagcagcttcctaaagtacgttccctaatctcagcaccatttttaaaaaactgcctccgcaggtacgcgtgattgcgcatgcgtgtcccatcgcaggacaaccttgtggagccagctctctccaacctaccagcttgtgggttctgaggatgaaactcgatggccaggaccccctgagccatcccgcaggccccaggtaatgctttgcatgacccccttcctgtttctcccctgatccacagacaattagccagcaccccgcctagccggcagggctgcctccaccctcccatgccccaccccgcccagcaacacactctccaggtccctgccttgcctggattgagtaaacttccctgtgagaagggcctttccggttcaggtctttctccagttctgcacctcagaaccggtctggcggggtctgcaaccaggcggtgcaatgaagtcgtcagaaatgctgctggggctggcaaagactgggtgcgctgggtgactggaagaataacagttccgcccttacacacgtacacacacgcacgcaccacgcacacaggcacacaagcaagcacacatgcgctctcacacagtacccagcgcacccctgcatggctctgccagcacagctcaagtctccctgcttcgtgttttaccggagctgatgggtggaaccaggactggagcatttcttcacatacatttgagatgtgcatacattagaatctgcacatgaaacaacacacacacacacacacacacacacaggcaaaaaccctgaagagctgtcccctgtactgtattcaaatccatacatgacttggctgtcccctaaagttttggtgttcgttaaccatccaaggcagatccccacagtggagtcaaattaggggaggccacaagaagcccagtgaggagtaaggcccgggagactcccgaattcactttcagagaagtcacatctggatgcttcctctgggacagcatgttcctgctgtccctgcccctgcagctcttaccagaaaagaatttgtattttagctcaaggtctacatcctttaggtagaggatgctaggtaggaaaagaagaataaaaagtcaatagccagctgcttcccaggtaccagctgggacacaacagacatctgtcagcttcgcctcctacaaatggcaagacctagaactggtgatatccttctgaggcagacagcaagcaattgcctacccggtctgtgacccctattgagacgtaatggttgacatctttcttctttttttgtttttaagattttatttatttattatgtatacagtcttctgcctgcatgccagagggcaccagatctcattcaaggtggttgtgagccaccatgtggttgccaggaattgaactcaggacctctggaagagcagtaagtgctctcttaactactaagccatctctccagacacaatattttatttatttattatgtatacagtctatgcagtcttctgcctgcatgccagcagagggcaccagatctcattcatggtggttgtgagccaccatgtggttgctgggaattgaactcaggacctttggaagaacagtcagttctcttaaccgctgagccatctctccagcccgggtgacatcttttgaggtaaatagcatggttaatagccagtaaccccttttacaagagtcttggtcattgttggttacaccctttgatggagagctggagattccttaggacaccacaaggctgtagacacccggggatgaaaactaccctatcacaacctaagacagcagcctaacaccagaaagtgctgcctatctgtcattctggctcttagaaggagggaggcaggagggtcaggagttcaaggctacatagacattgcttggagagggagagctgttgttttacaacttcagaagaccaatcttgaaaccacaaaaggatcagtctcagctttgtggttttaccccctaaaccatcctgtctccccccacccccaccatacacacccatacacaagcaaactcccacactgtgaaaacttcaagccgggtctgatggcacaggcctttaatcccagcactcaggaggcagaagcaggtggttctcttggttcgaggccagtctggtctacagagtgagttctaggacagccagggctatacagagaaaccctgaggggcagtggggagccttcagtactattcactagtactatgcctctgctagtctgggtcctttctaagggactgatggcagaaactggagggagggtaagggaggggaatgagatggtcaggtgccggagccacccttacttagcctttatgcaacaggagataacccatcaacaaaacccagttctcatcttgtattcttggcctccagcaagaacattctggaaacttttttggggtccctgccctaatttaccagtttctacctcctgttctcatcagaggcctgaggatcactgtctcaaaaaaaagaaaagacaaaacaatgatgcatggtggtgcatgcatataatcccagcactcaggaggcagaggcagttggatctctgtgagttcaaggcctataaagtaagtttcaggacagccaagaactgttacacagtcttgaaaagaaacaaacatgggctggagagatggctcagtggttaagagcactggctgaggtcctgagttcaattcccagcatccgcatggtggctcacaaccatctgtaataaaatctggtgccctcttctggcacaaaggcatatatccagtcagaacactgtatacatgatagataaatgatagatagatagatagataggaaacaaacaaaaaataacaagcgtttttaaccgccgagccagcttcccagctcctcatttgatatttaaagtttgcttgatctttaaaccatgtaaattgcttcatttgaacagcataagttagaaagccattgggaagactttctcttgaaaatccacacccacacttgggtgtgcactgtccttttcctgtgtgactctttaaacacccacgcttcaatctgaagtgtgtgctggttcttatctctacttcataaactctgtgactctactttatgctggcctgccctggcactcttgtctgcagtgtagccagggatcctccttgacctgagttaggtcccgaagcggtaaacccctcaggctactgacatcagtgctaggctacatcttcccactacaactgggatatttccttaattatttcctaagcatactgtttcacactgatcctcctcccagccctgtttcccctggatttgggtgaccagcaacatgtatggatgtttcccagagggcttggagaatcagctcggtctgtagagtgggagccagtgtcgtttgtgcaaagccctgggtttgatccccagccccacacaaaatcggagtggattgaagtagttctacagtccctctgtaacagtgagtttcagatgagcctgggctgtgtgaaaccctttcccggaacaacacacacaagagaaagggaggaaggaagaaaaacaaaagaaaaatcttagcgtggtggcggtggtggcgcacacctttagtcccagcactcgggaggcagaggcaggcgaatctctgtgagtttgagaccagtctggtttacaagaggtagttccaggacaggctccaaagccacagagaaatcctgtctaaaaaaaaaaaaaaaaaaaaaaagaagaagaagaagaagaaagaaagaaaagaaaaatcttgttgagtgttggtagcatacatctttaaatccagcacttgggaggcagaggcaggggggtgaggtcagcctggtctacagagctagttccaggacaaccaggactattacacagagaaaccctgctggggagtggagtggaggggaggggagaggggggaggggaggggaggggaggggagggaggggaggggaggggaggggagggaggggaggggagggagggaggggaggggaggggaggggaggggggaaaatcctcccaaggcatctaaaaactatgcatattttcagctgttgcagtgcaagttactcacttgttctaagtcactgaggtaaaactgctttactgccaagaaatgtcaggtgataaaaactccttgcaaagagacctcaatatgtaaagtgcttggggacccgagaccaatccccagcattcaggaaaaacactggacacaattaggtatgtgtataatcccagcactgaagaagagacctgtgagtctctagggctcactggccatccagcctaagctaattggtacatgttaggtcccagtgagagaccctgtctcaaaaaacaatgccaacagttcctgaggagcactaccagagggttagccttcacatacacacgcacaccaaagacttgttgaccagactcttgcaagacttctatcgagttgaggcatgtccctgggctggccctaaacaatggcttaaaatgcctccctgaaaagcctcaatgctgccaggaaaattgactgtttattccagtcagaggcaccagaacatccttatagtcgccaagcgattacttgagaaatggagatatagctcaacacatccggttttccgagactctgggtctccaacagatgcacacacaaacacacaaacacacacacacacacacacacacacacacacacacacacacaccagctttctctaatcatttttttttattaaaatctaacactgcaagctgtctcctccagaacatgaacactgtctcagacttcaattaaaggcatgtcccaccactgcccagctgatttgggattttctacacagaggatttctacaaaaagccagggctggccttgaactctgatcttcttgaaatggggacccttaaaacaaaggatctgaagctacttctccagattcctacaatggtctcatgctgagagcaaaagctgcccccaaactcctgaagcctggaaccagagtatgtaacagaacccgcccccaaaacagctttatgacctatctctcgctttcactctgggagggagtgggggaggcagcacagctccatctttttgtgagtgttatctgactttgtcctagcccttctataaattgcaactgccgtgggtgtgagaaatgttctgttttgttttccctatcaaattagttaggctaccaatggctaatgttttttgtttgtttgtttgtttggttggttgtttttttttgtttgtttttgttttttgtcttgttttgctttgtttttgagatagagactcactatgtatctctggctgtccagaaactcactatatagaccaagctggctcaaaatcacagatatctgcctgtctctgccttctgagcgctgggattacaggtaagtgccacatctggcaatgcaaatatatatatatatatatatatacacacacacacacacacacacacacacacatatatatatatatatatatatatatatatatagagagagagagagagagagagagagagatataatttacctctgcatataagtctctgcaccatgggtttgcagtgcctaacaagagagcatcagataccctgagacttgagttgcagctgattgtgaaccagatcccctggaaaagcagccagggctcttaaccactgagctttccatccctacccaggcattcttaagaaagttttgaagcatctcagtaggaccaaggcctcaggccacaccagttgcccaaatgggaaaagtcactaatgggagggcagacactatgagctaaccttcgctttttccagaaagggtatcatgtgacttaggctggccccgaacttgtgtagagaacaagactgaactgattctcctgcctcagcctccctagctctagctcacagcctgaaccaccacacccaggcttgagctgactgactgtgaagggagggggcgatggtatgactcttttatcagaaaacttccagctagaagtagtcttataatcttttggatagtttagaacgtcctgtctctgcccacggccatagctggaactcagcttcccttagagttttagttgctggctttgtaaactgtggattttgaggaaggatgaatcttaaattactttctctctctctctctctctctctctctctctctctctctctctgagacagggtttctctgtgtagcctatcctggcattcgctctgtagaccaggctggccctgaactcacagagatctgcctgcctctgcctcccaagtgctgggactaaaggcatgagccaccaacgcctggctcttaaattactttcaactctgctaatagcttagtagcaaaccacaaacgaatccgtttttccattttatatgtcttctcttaaacctgtgatatggaatccatatcaagtgatggaatccagtcaagactccatggttcatcaggaccgataatgctcccaaaccagcctctccctcaagtgccactgatgcactcagtgagtggagcctgtctcccatctctgatcaggttctcatcttgctcacagtgaactgagtgggcagacagctgagagataacaagggtaactgtttgtcactagacaaaagcaatttgaattggaaaataagaactctgcaacccttgctcctgccaaccaaaagagattggtagtgctccagttctgagtcctcaagcaagctttgtggtgccttgctgagaagtgccaacagaaagattgccagtgttcctgttgggaagctcttggaggactcttggagtgccagccaacagcagtacatggcagagcacgtctgtgggtcactgtcagaaggagcagaagcgaaggtctcatgttttcagcaggtcttgaagcctctgttggttaaggcaggaatgagtcaccttgcttgtggtcagttgggttctggaggctggctccctcaggacagtatgttccttgagtccatctctgaggagtcttgaaggtcagcctggtgaatccagtccccaggcctgagctacggagttgagacactctcaagacaaaagtaaactaaaaaggagcaggggcagggcaagaggaaactttctaatttgtttgtagagatttttccctgtcgttcttttacagttgttgtacttcactcattgtggttttattaaaccaatattctgtgtattcaacgttttagaatagtttctagcatgtgcaattatgctgcaaccaaatacttttgggaatacgtgtatccatattgttagagatatatcttcagggtaaatggcatgggctgccagtcacaggctgtatgcatatgtagatttgctaagatattgccaaactgttctcaaccagagttacacatttttgtgttccttccaaaactctgtgcgagcgcttgtttttccataaccgtgccaactgagtctgctgtcaagctcctgggtccctgccaatcagataggccaggctatttttaattcttcatgcaaacttagccccagcaaatcctgcaggtaactaacgtcacagtttggaagtgccacgccaggacggtctggcgccacctggtggcaacacattcgttgcaggaaaaacgctccttttcacaagctattgggcttttgcactaagtacctcatttctcaccccttctcccctaaacaaaggacaaataaatgatccccgcattaaaatgtaacgttcccctcgtgttgtaatgtgtgccgcatcccaaatttgaagaaattgcaaataactaggcattcaaaacaatggagcatcactggcataaaagtcgtatctggggtggggacgtgactcagtacttgcctaacaggccggaagacctcgcttgggtccccagcactgcatcgtgcatccagtgtgttggcacattcctgtcttcccagcactcagaaggtggagtacagagaacaagcaggtagaaaacagccttctagagagttggaagctagtctgggatacacgagaccctatccaaacaagcaaacgaaattaacatcagacgtatgggagcttttatcccagtgactacagaaatacaaactgaaacagtgtaagtccacacaaagctctaattggaagggaggaatcaaggggaagaaggggatgggactgattgcaaaagattaagacctcggacagaaacgaacagtactttataggttactggcgtggtctaaggtctggaagttgttgttagtcataaggatggtatttttaatagttagctgggcgtggtggtgcatacatactatcccagcagtcccaggcaagtgaaagatactggttcagaaaaacaaaccaaaacaaaaattctatttatgaagcacacctttaatcccagcaccagggaggcagaggcaggcaggtatttgtgagttccaggacaatcagaagtacacagtgagcccctgcctcaaaagtaaataaacaataaaaataagcaaaacctctatttctggtttaatttgactttcccatgtaagatacagatccttgcaaatgccatggagatatcctgtacttgggttttttcctcttgagataaggaaccgagtacattccacacattgttggcaaggagggaaagacatatttgctgcctaataggctgtgcattagggcaggtgagccagagtctcttgtctccttgacagtcctcatttctatatagaggtctacagagcaacagggctgcacagccagccagggctactcagagaaacaccaccttgaaaaaaaccaccaatacagaggtctacagagcaacagggctgcacagccagccagggctactcagagaaacaccatcttgaaaaaaaccaccaatgcctggctttttgtatggcgttttttgtatgttttgaaccatccacctaacagcttttgtgtaggtgaggagcttgtgtgtgtgagggcagatatgcatgcatgtggtgggtgccagtgcccatgcccaccccacagaccatgggaggacactgggcatcttcccccatcaaattccatcttattccctccaggcagggtctctcatcaaaaccaaattaggctggctgccagtccccagtaatctctgcccttcacctacctccgttagagacaacatcccgcttttcgtgtgggtgctcaggattcacacttagatccttgtgtttgcttggtcagcagcatcaacccactgagcagttatcttccaccccaaccagggggtgtagttgtcagctcctactgcctctacctaggaaactacctagggtgatcaggatgtaaactttcagctgctgctcctgtgccttcctgcaagcaaccatgctgcgccctgccatgatgataatattcacagcaacagaacagtgactaagacggacatgaaacaaatacaaatagggaaataaactgggcatgatagctcatacctgtaacctcagcacttaaggttcatgcaggagggttacagggagtttaaagctaaccggggctagagtaagaccacttcaaaaaaacaaaaaattaaaaggcaaagagggctggtgagctggcagttagtagagcctgtcacaaaagcatgaggacttgaattctgatcccctaacacccaagtaaaagctaggctcgggcccagcattggtggcacaagccaccacatctgataactccagtgcatgggggtacagacaggcagatccctggcgctcagtggccagccagtgtagccagattggtgagctctaggttcagtgagaggtggagaactattgaggaagacacctaaccctgatctaactctaacattggctcccacatgcatgcacagactgcactactcaaaagcagaacaagaagataccttgctacaggattttcctttggctaccattttccagtcaatgaacacacaggagccacagaacacaaaacatacaatatttattacaaactcacatcggtgaatgaccaatgaccaaaaggaccactgtggaggaaaacactggtagggagagtagaccattatgccaacctttatttgctgtggaacaatctttttctacattatgaatatgtataataataaaaagtggaaagcccgttagctgggcaggaagttagaccggaaagacaaactgagaatgatgggaagaaggtggaatcagagaggcgccggtgagccacccagagggcaggtaaagccacaggacacatggctacatagattaatagaaatggattaatttaagtgtaagagctagttagtaacaagcctgagctatgggttgaacatttataatcaatataagcctttgtgtagtaatttgggaagtggctgctgcatatttgggaacaggcagttgggacaggaaacaaccaattccatttatttcttaggcaggctttactttagcatggtctcacttagcttgggctgatctcaactcattgcagctgaaaaaagaccttgaattcctaatcctcccacctctgtacagggatgggccacaactggctgttggcctttgttcttgaggtattagggatcgaacccaggaccttgagcttgtcaggcaagtgctcttccagctgagctgtatccccccaaccctttatttccttaaggtccctcctagtttcctgacttacaggtccatttatatcaactcttaggggaaaggccaatgggcatgttttccatctttatcacaaagtctccttctagctatgtgtctcctccacccagggttgatgatacaaaggggtgtcaactcaggcaagttccttggcttttctgtgcctgtgaaatgaattagtaataacacctcgtaattcttgtttgaaaaaaggttctactaggcatggtggtggatgcctgtagtcccagcactcaagagttaagaggtcagggaacaatgcaagttcaaagctagactggtctacaggggaagttccaggctttgtcagggctatagagggaaaccgtgtgtgtgtgtgtgtgtgtgtgtgtgtgtgtgtgtgtgtgtgtgtgtgcgcacacacacacgcatgcacgcgcccagcacacttgagagggtggagaggaggctagaaagatggctcagaagagtacccgctgctcttgtagaggactaggtctatttcccataatgcatctcacaaccgtctgtaacttctgttccagagtatccgacaccctgttctggctttcatgggcacgaggtacacatgcacacatacgcaaagatcttatctacataaattaagaaaaccagtttgtcttgaaaaagaaaaaaaaaaaaagaaactttccatttcatactggagtttcacaaccaaagccagagaaggggtaataaatatagtggagaagcttaagaatttaaagagctttttatagattactgtgctggctgcatttatgtcagcttgacacaaactacagccacctgagaggaggaaacctcaattgagaaatgattccatgagatcaggctgtggatcaacctgcagagcattttcttaactagcggttgatgggggagggggagggcccagcctgttgtgggtggtgacacccttgggcactgtaagaaagctggaattcactatcaacaggatttaaccaggagtcacctggggactctagcccagggccaggaggcaacagctctgctccacaccatgtggctggctagggcaggcctttcctcaaccctcaccacaggccgcaggtggagtacccgagccaacccttcaccagtattgggcacaccaaagcacaacttgacaaaaaaaaagggggggggcacctgggcagtggtggtcatgcacacatttaatcccagcactccatagacagaggcaggcagatctctgcgagtttgatgccagcctggttggtctacaaagataggctccaaaagctagagaaatcttgtttcgaaaacaagccaaacaaaaacacccccagccaaaaaaaaaaaggataaatgtatccttaacattattggtttttgtttttttaccaggaatgctttgtttaattcccagttggcctgctcccaagaccccctaaggcttttccagaaagcccacagtggaggccagagtgcccacgcatgccccatgttacagcgttatccttaactttctgttgtttcataccagagtaagtacctatctcatggaaacaacattcttgggattagcccatcccccattcccaaaatctttaatatagcagcaatttctaggtcattctcatgtaaggacaagccttttttaaaaagctaaattaaaatgtatctgttttaatgtagctattagagatggctcagcaggctaagagcacttgctgttccttccacagaacctctagttcccagcaaccacactgcctccaagtcaaggtcaagggaatccaatgccctcctgtgtcctccttggcacctgatatacccacacacatatacataatttaaaattaagaaaactaatgtttcgaagaagagacagatgaacagacatccctaatttaaattacaggactttcaggaaaattttagatgttcaagtcacttttggagtcccaattatttctttcacctttcatttttaggctgttttgttttgagaaaatgtctcaagtagcccaggctggcttcaaacttgctgtgtagctgagaaagaccttgaacttgtgatcctccggcctctgcctctcaaaggctgggatctcaagtgtgcacaaccacacctgattttatgcagtgttggggatccaacccagggcttcaggcatgccaggcaagcccttcactaacttagctttagctccagtccaggagtcccaattctcgtactgaggaatttcaggatttaaacaaaatcaatgtgaaaaatagacatttattacaaatattaagttttgacactataaaatgaaagcagacatgtcatttccaagggatgttgtaaccaggagaggtgaactccaagagtgttaactgattcccgtcatcaaaagcccctgagagaattatttatctcaaggggtgaaggggcaataaatcaccttgggtcctttaatctgtctttaccctcctgccaccccacccccaaccatgacaacaaactgaaacatgtttgaaaaggtcttatccttactgagctgtttcaagttttgcatttattgttcaactggattttatttcctctgacaagacccttaagtgagtacttagtttccaaaggctggaaggggcccaaatggaagaaagcaatgactaccagacccatcttgctgctaattcctgctgtctcaaacatttaaagtagttcttcacatgaccagggaaccccggttagaagccttaggggtgtccattaaacatccagggctcaacagtagatgggcactttctgcccccacttgactatggccaagtagagcccacccactccccccccccagcacagcaccagcttcaccctggcagcaggaggctgtgcactcagttctcactgcagaagtgttgccctgagcttagaaaatagtcctgggggccagccacaagttgttgggaaacagaactttccgacatttccctgtttacacaaaggagcccagagtcccttttaaagatcccattccccaatttccaacaaaaacaagtttcacaaaccaaatttttatttccaacaacaactgtctaatataaacacacagaaacacaaccttgccaaagagctgggaagcccttctgtataacaaccaatgaacttctctctctctctctctctctctctctctctctctctctctctctctctctctctctctctctcacacacacacacacacacacaccccaccacagagccaagactataatgcacacatttccacaacccacacatatcttacaagggtctgtgcagttgttccagccaagggaagagtgactgccggccaccagtcccaaccttttctttagatcagcagtttaaatctgccttactccaagtgtcttggttgatcactaaactctcccacctcctgaggatgaggtgtcagtttgcttatatccaggagaaccccagtggcacattttgtggggacagaaggctccagagactgaagagctgaggtcaccaccaaacaattcagcccctcctttctccagtccccactccagagcagctggcacccaacctcatcagggcaggagaaagctgggcaattaggcttaaagtcgttattcaatccggtcatttttgatgtctagtctaggactctcgtccaatcccacagaggaacagggagtgaaactttgtaactaacctcaggccacccagtggtggtgggcaggaaaaacaaaggaaaaatagctgacgttattgaaatcatatcctagctaaaataaaagtaaggggtcccgtggggcctagaagacactgaaggcatcctgtgcagctacagccagcaggggccggaccctgtagcacctgagtaaggcaagcggagcagagacgagccgcagcaagtcacaccaggaatgatgaggtctgtttgaattccccctagggaaacaaaacatccagtcaactctagtctcattttgctcatcaatacacaaataggctagaaacttctacttgatgtggaaggcctccccactcttgggggggggggacacacacacactctcacctcacttcgagcacttggctggctgtaaatcacctttttacctggagcagtcctgagggaaaaccagaaatgggagacactcaggccctagcaatgaatgtatccttgccaacgtaagggaccagaatgtaaaactttgcagacaaactgagtgcaaggtgaagttatcattcctccaaaaccactgcttccacctcactcccccaccccactccacacccagggctcagctcagctccaaatcacacagatccatgctttgatgaaagagcccagggacggcatcatgctcaccctttctttgctcctgaaaaagaaaagcaagagaaagaggccatgttactatcagaatagaatgcagcatggcatgggaactaggggcaagtagtctgtggtttttgatatgagctaaatcaagttacccatgctcccagcacatggaacatggtatcaggatccatactcagatggcacccacaaaccatgcaaggacaaagaactcccagctgggtacagtaaaagtagcacttgctactctgcttggcacttaaacggctgaggtaggaggatcacggtgagttggaaggccaagtttcaggccagcctgggatatcccaaataaacaagcttctaagggggaaacacttactttcaaagtatcctcggctataggcgaaccagatgccaaaaatcaagaatccaaggagaatcagtgttaccaggacagctgccacgatgccccccacattcagctccactgtggacacagatgagaggtcaggtgtctggatacgcactgtgctgctgacaatgaggtcaacaaccacttaaaaatcagcctctgatcaatctcaggctgcagccacacttgtactcaccagcatccatgcgtacagcctctgacctcgtggctgtcccaaacccattctgggcttgacagtagtattcgccgctgtcaaaggctgtcacaggatcaaagatctagagggaagagaataagctagcttcttgctcgaatgagtcaagaaacctatcctgttagttctctgacaccatcagccctgatgtttcttccttccccactctcaggggttctatggccatgactcccctttcacctctcccctttcgtaccaggtcccctgtctttggattaaccgtgtacgaagaattgacgaaggcacgggttttcttggcatccgtaagcatatcaatcccatccctgtaccaggaatactcagaaggcggggagccatcttgttctgaacaggtcagcactgccctgttcccaatggtgagagaggaggggatattgaccgtcggcttggatggaggcactagggaaggggaaaagaaaaggtgctgaatacaagggcaaaagggttacctactagtgtaggtaacaacctagggtgacactctcaagcaatcagctagaggtgccacctgtatgccctgagttcccatcaaaggggcagtgggggaggggatggggtgcttaccccctctatatccccagcacccaaaagacctaaagcttagcagtctactatcagggttagggaagcgactggttttcagcccacatgaggttacatggcacataccaagcacggtgagttggatgctgacctccccatagttctggccaccgtcctcagagaccatacaagtatactctccggtgtctttccgggtcacagatttgaatgtgatgccactggacgagaaggtaactcggtctgcataggaagctaccaggagagagagaagcagaagagacaacgtaaactggacagcaaagagaagatgaaggtggcacccagggtacatcatcctccactaaagggaaggaagtacttagagccttgagctccaggtgtgcccccacctcaggaattcaggcagggcagtgtcaatgacgccacaatctgatttggcaattaagacaatttacctgtgatctggctgttatagcaaacaagcgtggtagtgccaccttggacgaacttccactccactctgggattggagaagccagagtaggtacaggacaacgtgatggctgcagacaggatcaagatgagagagagggataaagaagtagccccaaaccacaagctatgtcctcccaaaccccaccccatgccctccacagctccgccccactcacggttattctcagcaacttgcacgtctgtgttagaactgtacactgaaccgctgccttgtaccaaagagcctgggaagaaaaagagagggtcgccatcaggagacagggttgccacagagaaggaagaacagagccaggagatgaggctgagagcacaaggtgaagggagagtcaagctggcttgttgtgatgttttctttattttctttgtgttctggcaaataaagcttgcctggagatcagggggcggggcttaagatctcgattcactggccagtgttctgttacaatggtgatcaggacagtactccttctatcaatggaaatgaaaaatccctttcaaatacaactttttttttcttttttttagtggcttcctctatggctcccaatacacttaattacattcctactggtcaaaaggcagtttgcagaatgacatttcatggttcagagaaaactccaaaaaacactgcagccacttgtgcaaacaatcctggaaggaagccagccagctggaggcaagtcaggcaggggaaggaaggatgggtaatgagggtaaaaccactacttgacatttgtagaacatcagctgtgtctaaaagtgttttcagagatgtaacattgtttgatccttgaaacaagcatgctaataacaggagttattacctgaattttacacaaggaactgagactacaagacagatgtacaaaatcacataattggctgttgagaccacgaaaaggactagaactgagctcagatcacctcatcagaatcacacacttgccaaatgaagaaagaaagaaaaggtaatgtttgttggggcagagacatgaggaagctaattaaataacacgggagcaggggaattatcagggttcacattaaagtccccaaactagtgacagaggactctgtggatagggggctgtgctagtgcttacacacacacacacccctttgtgttttcaaagttcaaatttacaaagactgtatttatagctctaagtcagagtccctagataaatgcagaaagacatccagtgccagcatggccgtagcagccaagtacactctcctttatttacatacccacagaactaaatacatagtctcttagcctctgaggtctcattccttatgtgaaatgtaagagttcaaactagatggtctccaaagctttgtttttctccacactctctgacatcactgtttaaaggactttctttgtttctgcagtgcttcggatcaaaacagggccctatgcattacaggcatgtgtgttactacccagccacacccccagtcaggtctacagaatactttatatgtattgatttcaatcagacaattagcccagatacctttttttggctgggttttgtttttgagaaaggatcccactgtaaaccagacccgccttgaacttgttgatcatcctgtccttacttcccaagggctgggtttacaggtgattaatccatcttcccaactccagatctggggggactctgaaggattcctggttcaaatctccctgtaaagtgggcaactctccctctgccaggcctcatacccttctcctttccacacctgtggatcgatcccaagagcactccttaataaacgacatctcagacagatgagtgttttgcctccacggatatgagtgtactgtgacaggacagaaggcatcagatcccctggaactagagttacagacagctgtgtgcacactgtatgcatacgtcactatgactggtttaataaacaagctgactggccaataggagagccaaactgagaatgatggaaggaagtgcagagtcaggggagtcgaggaagtctccagccagatgcagagagagcaaaatgggcactcgggactgagaaaaggtactgccacatggcagagtgtaaataaggaatataggttaatctaaatgtaagagctagtaacaagcccaagctatcagcccagcatttacaattcattataattcagcctctgagttggttatctgagaatggaatctggatcctttgcaagagcagcaagtactcttgggctccaagccatctctccggcccctcagatgctactcttaagtcaagattcaatgatctataagttatttctaatactatcactttgcatcatatttttcattatagactttttgtttgtttttatttatatttttttttttattttctggacacagggtttctccctgtaacagctctggctgtgttgggactcactattgaccagactggccttgaactcacagggatccgcctgcctccctagtgctgggattgaaggcgtgtgccaccactgcctggctcattatactgttgaattcatactcaagtgtaacaacatatctagaaattaagccaaatagccctcattaaactggaacgtcaagctcagggttaaaggctcttcccacttgaggatgtaaacataaccaccagttcagttcccagaacctacatcaaggtcgaagaagagaatcgactccacaaagttgtccttaaacatacacacacacacacacacacacacacacacacacacacacaaattttcaaagcatctgtaatcccaacatttgggaggcaaaagcaagaaaactaatgcaagttccaggccagaatctggtggtccacaagtcatccctgtctgaatgctgggaatcttgttctacaaaggctctaaggttttgcaattcgccttctgtgatgtacacactgtgatgcttgaaccaggcatctcattaggaatgaagaactcactgccccagtggctgtcagtgctgccaaaagaagacccacaggctcacagctgctacagaacaccaccttgccccaggacctgctttctatcaagagtaggggccggcagaaaccaattatttgacaacaacaggagggggttgacggaaagcccccaatctacttcccaactctccaaagctccctgggtagttggcggaagtgtcagtggccctcagcccctccctcttcccaatcctgtgtcctgcccctcctctccacaggtgtgtctggtgtgataattgatatctcagcttctcaagaacccaacctctgacaccacccaaattatgagcaaacatctaattaaaatgaaatgcagtctctgaaattcatgcacgtgcacacgcgaacacacacacacacaaaccacaatgtataaatgttagttactcctgctactttcaatgctgaaaacaggttttccttaatcaactaattaattaggagtgtgtgtgtgtgtgcatgtggaatgctgtgggaggtcaataaacaactttttagaaaacatttctctccttccaccttgcagacatacatctctttctgccactgtgctgtgtttttccaggctaactggccaaatctggctttttacatgggttctgaccactgaactcaggtcaggttaaaacaaatagaacatcgaacaataacaaactccaaagtgcctagtgagtggtaacagaatttcaaaccaatacagccacacactctaatacactccacagccgcctgtccaaaggcagatccaatcctacctcctgtttttgaagattttaccctgcctaggtggcaaaatgcaaattttcagcaagctaagaaaatcccagtgctatctgagccgtgataagcttcccatttttcactcactctcctgttgcaactggccaactggcaacacaaaaccacttctcagctgtttcccaatccctgcctttgctcaagccatttctgctatgtgaaacgccctttcccctctttgtctggtaggcacctatcccttcacaccccccccccacacacacacccggaaatgacccaccacacccagcactcttagagcctctttcctgactgagctttcattagcccctgcacggacaccattgaagtggttccggaattacgtgctattacatataaacactcccatgtctctccagtacatggctagacagcaaagaccatgcctcgtgtactactcaactcctagcatagtgcctgatactatgtatcgcgtatttgctgagtggcacagaactcaaaacaaattaggtcatggcagaacattcactgtaatacctacttgttgaggtataccttccaagtccagtttttaagtgggcaggacagacagtaatatggccaaacaaagaaaaaacaaacttgtttcaaaatccaatatctgtaatattttaatactaacacaattctttttttttttaattccagtttggggagggagaaactaaacttatttattattttcgttttgtttgggacagggtctcatgtagcccaagctagccaatttctgtttctcctgccatcacctcctgaaggctagggttgtaagagtactctatcatgcatggttttctccatcactggggattgaatctaagacttcctgcatgttaggcaagcattctatcaattgaactacaccctcagctcctaaaacctagttttgttttttgcttgtaagattttatttgtatttatatatgtgtatatctgtgtatatacacatgtgtgagggtgtccaccgaggccaggagagggcagcagatcccctggaactggagctgcaggctgtgaccctcccaatgctggcactaggaaccaaattcagttcttaactgccaaaccctctcaaaccctaaaacttggttctgtaatttaaaaacaaagggggtttgggctttactttgatgttttattttctgagacaatttcaccatatagcccagactgtccttgaagtggctgtctagaacaggctggctttaaacttatggaaatcctcttgcccttgacttttgagtgagtgctggaattacgagtgaatgcttgagattacatggttgctccaccactcgaggttacaaagtgattttaaattgagttgccttgaaacaatgttttagttctctacccacaattcccacttgctgttttgtaaagaggattgctttctgcacctaggatgcagtgtgtctgcaggtgttccatacacagcagcagcaggtgcatctaggctgtgtacactggtacctgcagacctccagagaaagaacagagccaagagtagaacaaaagccaggacaggaaaacctctaacgcaaggtctaaaatagcaagcagtgggagaaacccctgtactagctgtctcaactcagtggaaaaagagaagtgacgagaggagagaagagggctggagaagtcaccaaggactcagaaatttctgagtcagacttggtcattcaggtaaagccattaccagtaaaacacatggtcaccctcattcatttgtggttctaaatcaagtgaaagccagtcacacttgtaataaaaaataaataaaaaataaaaataaaaaataaaaaagctgggcggtggtggcacacccctttagtcccagcactggggaggcagaggcaggcggatctctgtgagttggagaccactctgttctacaagagctagttccaggacagcctctaaagccacagagaaaccctgtcttgaaaaaacaaaacaaaacaaagcagagtgagagatgctattccacagagttcaagtggagggttttttgttgttgttgttgttgttttgttctgtttttttttgtcttaattaaggaaagggatcataaaaaggggaaaggggagggggggagaccagcctctggggacaggtgcagtggaagagaggaaagagaggaagacacacaaacacacacacacacagacagaagggagagaaagaaagacaggatgggaggtagacagggcccttttaaaagggaatgtagtgactgcagctgagggcatatcctgtcagaacccaacgggcaggacagtacagatgcctgaatactaacaacactgacacacacctgtaatctggtactcgttatagtggttggtgaaaggatacggagttcaaggtcagccttagctacttggtaaatctgaagccagcctgcacttcttggggcccagattcaaagaaaacaaaacaacacaacaaaccacaaatgagaaggcatatatatatatttcactacttaaaaagtgagtgctatttgggggaaaaaatagcagaaagaggtgaatccattcccaacaccttcatttattttcatgaccccaagagtagcagcagcaacaagaacaacaacaaaaagtttatgtaaactcgggctggagagatggctcagaagctaagagcactgactgcccttccagaggtcctgagttcaattctcagcaaccacatggtggtggctcacaaccatccgttatgagatctggtgccctcttctggtgtgcagatatacatggaagcagaatgttgtgtacataataaataaaatcttaaaaaaaaaaaaaagtttatgtaaactcaagtcaacagaataggaaactgttagccagtccattgcttttgaggtcagttccaaaaaggtttgtgttgttatgggctgtgctgtgctgtttcccccaaattctcatactcccaacacctcaggatgtatttgtagacaggaccattaaagaggcagtgatgttaaaatgaggttactactggatgcttcaatccaagccagatggtctctttataatagataaggcacaaagtgtgtggcattcgaaccaacagtaagggggaaagccatctgccagccaaggagagaggtctcacagagaactaatccagccagtaatccatcatagacttccagtatccagaactgtaagaaaaattttgacaacccatggtgtctgttacagtggccctagcaaactaacccaatggccctctggtttctatatgcgcccacaccagcataccacataggtaaaaggcatgaggacatatctgtacaaagagtcagcttgtcttgcatggtgaattcatcacatctgaattgtatgatcaagaaagctactgactaatacaatgaccactaacattttttttgaatattcactatgtgcccgctactccatttaaccttagactagtgctatgagacagatacaattatacttctcatcttttataataagtagggcacagaaactaatttgttcaaggtcacaaaactagtgggtggcattatgtgtaactcacataatttggttctagaacataaaactgaatcaattaacggatgtaatgccatatcctgccccatgtgtacacacacaaatatgtgtatgtcaacacgcctatatggagctcgaaagacaatttgtgagacttctctccttccaacatgtgatcccagaaaccaaacttaaactttttgacagacatagctgcaagcatttttacctactaatccatcttgcttttgtttttgaaacaaaaatctcacatataaccatggacggcccgaaactcctctgtatgactcagggttttttgtttgtttgttttttatgactcatgttttggagagaaagataaaccttaaaactggcctcgcttccttctgaaaatgaaaacaataatgaagtggcaggcatgatggctcacacctgtaaccctggcaagcacttggagatgggagggtcaggaaggagttcaaggtcacccgtcttcagctacacagttacaagcaagtctgggctacataaattcctacccttaagaaaaaaatgaataaatatggtgccatccccaaagccaatttaaatcaatctgaactggtacagaaatatttccagaacataagatttaatatatatggtgccctcgtcctttttgagtcccactctacctgacctgaacttgccatgtagacagagtaggcaagttctgcctctaattcacagagatcagtcttcctgaggctccagtgtactacctttaaaagcatgcttcaatctatactgaaaaataaaatttacaaataataaaaacagcccaagcatagacattttaaaatctctaagaatgacttccacgtggcagtctccattatctctcctgccccgtgctgtgtctgtaataaacaggtgcaacggaaataatgtcacttagagggaagaggagctgggaaggagcagtcacatttgtagtgtcagcagggcaggtgtgaggcaagggcaacctggactacagagtgaaaccctgtctcaaagtaacacaagggaagggggtggatcagataagctacaagaagaaacacggccaaataaacaggagaggcaaacacagccagaaactcgagggcacagggctgggagtacagcccaggcgcagagcacttgcctagcggcagaaggttctaacttccacattcagcactacaaaaggagaaaagaagagggggaagcagccaatatcagttaacagtgtaaactatatcagagagcgaagaatgttcaaataaacgttaaaaggtgaactgaggtaaccaaggagaaagacgcaagagctgctgggaagccgacgtgagcaaggaaaagggcacgagagcagcagagcacagatgtcctggagacagggaacagagagcaggaaggcagaaggacatgcaagggaggatgtggaagggaaaagagaacaggaagcgggttaaaaaaaaaaaatcacaaaatattatcaactaaatcaggcaatctccacatattttcctaagagccatggctccttttgctcccccttcccctccccccaagacactgggtttttggagacaggttctcagtatattggcttgtctgaaatcagtaagtagatcactttggcaatcctgcttctgtttatagagtactggtatcacaggcatgtactaccaggctgggcctaagagactttttttaagagagctggtagttgtacctagctagtatgttctccccacccccactcgttatcctcaggggattgcattccaacatgttctgccaacacatgaaaacaaagatggtactaaacccaaaacttttgatagtttttctttcatgtgatgaaactcgattgataaattagaaacaataaatttttttggttttgttttttttttgtttttcaagacagggcttctctgtggctttggaaactgtcctggcactcgctctggagaccaggctgctctcaaactcacagagacctgcctgcctctgcccccccccccccccgtgctgggactaaaggggtgcaccaccaccgcccatcgaaacaatagattattaacagtaaaatcataatataagataatggtaatacactgtgttaaaggttatgtactattaatagctaagcatgatggtacatgcttgtaatcccagcatttgagaggtgaaggcaggaggaactcaagacacacatcagccacatagtgagtggaaggcgaacctgaccacaggagactatttcaaaaactacaacaaaatccaccccaaattcatgcactatttatttctggaatttttgttttaatattttcaaacccagacaggccacagttaacttaagatgcctaagtgaagacaagaatcaggggcagattatataaatctgtaacactgatcatgtaagccgggtgttggtggcacacacctttagtaccaacactggggaggcagaggcagaaggatttctgtgagttcaagaccagcctggtctacaagagctagttccaggacaacctcgaaaaccacagagaaaaccctgccttgaacccccccaaaaaaacaaaacaaaacaaaaaaatactgactgtgtaattactgaaaattcagtgtatctgagtaacaataaaaaactgtggtaaatggcttttccgaaatggttacatttatctagtatttatctcctcccatatgcatgactagggagagtctaagttcccttcagtctggacagagtcctatgactactaaataacagccaagagtgatacacagaatcttcacattaaagtcagtgctactttcttattaaactctcaagaaaccaagccaggaatggtggcacacacctttaatcccagcactcaggaggtagatgcaggcagatctctgtgagttcaaggccagtcttgtctacagagcaagttccaggacaggctccaaagctaccaaagaaaaatatttgtctccctcagtcagagaacactgcaactgtgtggctatagattaaaaaaaaaaaaaaaaaaaaaaaagccaaaatctctctctctctctctctctctctctctctctctctctctctttctctctcaggtacaatatgaactgggcattggtgtggcttgtctttagtcccagctctcggaaggcagaggcaggtggatctctgtgagtttgaggccagcctggtctacagagtaagtgccagggcaggctccaaagctacacagagaaattctgtctccaaaaacaaacaaggtacaatatgctttgaaaggcacttaaaaaaaagaaaagaaaaaagaaaaagggtataaagccataaaaaattgttaaaaataataaagactttagagttaagtaatattaaaaaatgagaaatataacatggggagtttggaccttatatggtgctttgttaattttgaattttttgaatgctaatgaacagagaatgacagccactgagagacactggattacaaaaaggactgctaaattaaaccagcccatatactttagagatgtcttgacttcagaatggaagttgggaaatgtgttgcattaggggagagggtgtgcttttgtttccagaggaaacaaaaagctatggattccttcacaactgataaagatcagatgtgaccagggaagacctcctgaggatcttggctagaaaacatgaggggaaaaagccaaaaaaaaaaaaaaaaaaagactacaggacaggtgacgtatatgctgatccctcaacatgggaacaactctgatactggatgagacatgataaattttgttggttacagggtcctcatgacttatattacagtctggataagcagtccaaacagacttattgttgggagccaaatctcagggcttggcatgagatcctaggccattcttggccggccacatagttgtatattaacctttacatagcagctccttagaacctcagctcaagaaaagaaacaacttgacccagtcctccacccacaggctcagtcacctaggcaacccttcctggacctcttactcatgaactctttaccctgccaaacatcctctttgtggcttcctaatatcctgcctacactaacacctggtgcacaaataacccattccaccacccccccatcctgctctactgactatataagctagcctgagaaaaataaagtttgccacttgatcagaatcctgtcttgcggtcgttctttctgcatctcttgtccccattccctatccctgactctcttgctccaggttgacatcctgtgggtcaggacaacttataaagttgatagatgccttttacccactcaaacataacacacacacacacacaaaaacatctttagctgacttatgctcaccgtacattccacacttgtgttaatagacatatatgctacctttaaaagtgtaataagagttttcagaaaggagggggaaaaaggaccagatgccaataaagacaagtagcccaggtgatccaacctctcagaatgcctctgttaccatttcctcgaaattctgcatctataacaacttcaaagctgctggccgagatggtccagcctcacagacaactccagccaggacttcagataattctaccctttctcatcccagagactggacaacaaatggtacagctagctctccccaagacttgatcattatcccaattttctcagggtccttttaggatgccattgctcccagacaaaatgaagcagtctagagagcacaacgcccacatccccaagacatggggaaggtgatttctggtcattgtatgtttatcattggaggattagttataagttggtactggtcatggtccaaaaacaaacaaacaaaagaacccactaaaaaaaggactcaaggatctctttctaaaaagaaaagggggatataaaaataatgggttagctgggtgttggtggtgcacgcctttaatcccaggacttgggaggcagaggcaggtggatctctgtgagttcgagaccagcctggtctacaagagctagttccaggacagcctccaaagccacagaggaaccctgtctcgaaaaaaccagacaaacaaacaaacaaaataatagattaagggctggagagatggctctgaggttaagagtatccactgctcttccagaggtcctgagttcaattcccagcaaccacgtggtggctcacaaccatctagaatgagatctggtgccctcttctggtatgaagatatacatggaagcagaatgttgcatgcataataagtaaataaataaaactttagaaaaataataggttaaaatggtagattatttaatctactttaaaccaaagaacaactattaattccaaatattttacattggtatggatttttataaattgatacaagtttaggttatttttgttatactgtatatatgtttctactcttgtttaaggtattgtacttatgcagctcacttttaaaatgtaatgtaaagttctagcccttgaaagttactattacaaactgtttaggataattaagcaatgcaggttagcagttaatcatctataatgaacttgttggccattcaagaacctccacatggagtttgccttcagtgtggcaaagctagccatctgggcaagaaactgcccgtgcttcaactgctgacagaatgctatccaaactggacaagcaggtcacaaaagaaggcaactgctgtactttgccaagacaaggtaggacagtccttcaaatatccctgccaaatattccaggactgaaggcagaagatggatgccccaacattacagaggaacctcaggtgactgtccaggcagccagctgtctcttgttgtttttatagttttggaagctgtttgtgctgcacttcctgtttattccttctcagatctttgatgaagactagttacagttaagttttcctcgaattcagaaaagaaataataaaaaaaaagagagatgtaaactgtaaaaggttgagagatataaaagcttgagttgcttatctaagaaaatattttaaggtctaaaaaggtatttttaggttaataagacaagctatgacagaagtgatttaggtataaaactttggacattatacaggatagacaatacaatactttctccaaatttgcccaacgcaaatgaactggacattgtgacttacaattcttacctgataattgttcttattgtatagttttcctgagagttaaaacctttctttttatttagacaaaaagggggaaacgttgtgggatatttgtacagtgtgaaaaaaatgtattgctgtgattggtgtggttgaaaaactggacagccaatagctaggcaggtggtttagatgggacttcccagaagagagagaaatctgggaagaaaggtggagtcagacccaggaaggaaacgggagacaggagagaggtaatgccatgtggcagaatgtgtattaatataaatggattaatttaagttatgagctagtgagacaagcctatgccaaggctgagctttcataatcactaataagtctctgagtcactatttgtgagctagtggcccaaaggaaaatctgaccacagattttgttaattttgctttgaaagtgagtcactctgtggtccggacaggactccaactcaccatcctcctgcttcatgcttcctagtgttgattacaatcaggcaccatcacaacccactgtgcctccatcacggtagcatagtttttatctttttccgcctttctttctcccctcccccaccgtggcaagcttaggagctagagagacggtttgttaggagaacttactgctcctgcagcggtcccatgctcagttcccagcacccagtcaagtggctcacaactgactgtatctccagctccaggagatctgatgccaccttctagccgccttggggacccaaacatgtatgttcatagacacatacacatatacataaataaaataattttaaaaactgaacagaggtacaccacaaaaatggatagtgcccatcccagaagccatgggttattaaatagaaacttcaccaggtagtggtggtgcacaccttttatcccactcagatggcagagacaggtggatctctgtgaacctgatctacaaatcaagttccaaacagccaggactgtaacacagagaaactctgtctccagaaaccaaaaccaaacaaacaaaaaaagaaaaagaaagaaatctcagtgccaagtgtaggatacttccttatgaatgttggtcgggcagccccagaggccccaaaacatggaggatgttctcatttctcttacgtgcccacctgtaacaggctttcttttggaccaccaaccaactcccatcttatgctcatttcttgctagctcttataatttatattaacctgttgccttggggctttttggctttcttccactctgtatgtcttactctgtgtctgattggctggcggctgcctggccccagatgtctccctctttctccctcattctctcctctcctctcctctctgcctgacagccctacctatccctctattgctaactattggctatccaattttctatcagacctaacaggtgccttaggcaggcaaggtaaaacagcaacacatctttacataattaaatgatgcataaacaaatgtaaaacacctttacacagccaggcattggtggtgcacacctttaatcccagcactcgggaggcagaggcaggcggatctctgtgagttcaaggccagcctggtctacaagagcgagtgccaggattggctccaaagctacacagagaaaccctgtctcaaaaaaacaaaaacaaaaaaacaaaaaaaaaacctttacacagttaaagtgatagtccacaacacctaccagaactagatggtaagatacaactgttaaagatacaacatactttagctgtaggacatagagaaatcaagctggagctaagctagaagcttcccccctgccagccaactttcacagttctgaaaggtgctatctagacaacagagaagcaaagtaatcggtgatgtttcaccgcagaggatcttatgtgctatcacaccaacctgccaagcaaaccatgcccactgtgccatagtggcatgacggttataggaagagccaactgcattctgagtagatagaggccactccactggagggaatgtatggccggtaccatggacctggtcaaaaggacctggtcaaaagcatagcccggggaggttggaggttgtaggccacccacaggccatgagccctgctgcttcattttgctaagcggacatgctactcaacccccttctaaatacatcaaagaagtttctctgttgcagatggtggttaatgacttacaaccaatcaagatgataaaaataaattattattgaacattcatgtctacacaggacaggcctttgtctctttgggaaattcccaagcaggttcactaagagggacaaaaggtatcccatcaacaaatactggattaggctagatgttagctatttggcgcactcagtgatggttactatggctgccatcgctggcgtgtcaggccaggttggggtaccactacaccccaacagttggtctctaacctccattcatcacacacacacacacacacacacacacacacacacacacacacacacactcacattacaataaatatatataatactacaaattggtttttaaagactaacagcggaggaagtggaggtttaggaaaggccatcttctgggcatggcacagctgtttcactcataaccttagcagctgtggttgtctgacaagaccggacccactgcaatttagtcagggctagaagaggggcttctgggccccctcacccagtagctactggcaggtgtagctacgggggaagcagtgagtcactgtctacagtggtgtagccacagctgagttactcagggaccactagttttgggggactttgggagtggttttttgtttgtttattttggtttgggacttttgagacagggtttctctggagctttggagcctgtcctggaactcactctgtagaccaggctggccttgcactctgatctgcctgcctgtctcccgagtgctggaattaaagatgtgtgccaccaccacccagcaagggccagtaacagcacacccaaggccttggttaaactcagtgggtcacaaagcaaaaatacatcagagggccaatgagatggttcagcatgtaaagatgcctgccgccaagcttgatgattggagttcaatcccatgggaggagagccggttcacacaagttcttccctgacttccacatggtacacacaaaaatgaaatttaaaatatttagtccttaagggggggggggcagtagtggcacactcctttaatcccagcacttgggagcagaggcaggcagatctcggtgagttccaggccagcctgacccacaaagtcagtcccaggaccaccaagactgttacaaagagaaaccccatctcgaaaaaccaaaacaaaataataatagtagtaataaaataaaaggaaagatgtgtaagtgggaaggaaacttgttgggaggaaaggagatcagagaaacggggataaaggtgtgtgagagcatgatcagagtgtattgtatacaatggcaccgtcaaagaattatttgaggagtcccgcctcagcgtctgtgtgctggcattagtgacacatgccaccatgcccagcacaaaagtcactgcctgccttttgctcccaaaacattctgtgctttgttgatggttgtctggtatattccattcgggaatcatgcttgcaactcttggaaacaaagacaaccagctggtttcaatcctcccaatctctagctctggatgttccctgagcctccgagaagctgttgccatatgaagttgacacagacacactggagactccagacactgaacagagcccccccaacaacctatgtttttgaacatgagggtccagtccacagcagaacagctacttccttcttctgttttaatcggaagccctttgttttctcttaatacacatcctgttaactgttagaatatttctcaagatgctcgctcttctgccactagtttgatctttaaaaaggaaggaaggaaaaggagggaggtcatccagccagtctctgcttttctctaagaacacagtacttcccatgtgggcataggaacttcagacaacgctctgggcataatgaacaaaagctctctggaggctgtgggggtcctactaggagcaggctcagacctctgatgatggtgggaatggataatggccgtggaaggaggggaggctttcactccatggctccctcctgcctctttgtacactttccagttttacctgttcggccccctcccccattgcagaggacagccactcctgtcaggacagaattcaccccagggacctggcatcagacttcctgccagccagctgcttcctctaatcccacccccacgctgtaaaacaaatgacacaagctggactttggacagaaactctgcttatcagggagtcccaggccgacaaactccagagtttcaatgtctggaaaatcccaatatgcatctgctcatactgcttcccacaggctcctcccaattccgagaaacttctttctcacttaccatttgctttggacacctagtggagcctgtgaagcagaaacagatatgaactctgagatttcctagtctcaaagccaacagatgtgagaaccaagccccattacttcctaatttgccacataaaatgtgtgtagtatttcaatccatctgtgaaggttggggggtgtcagcaccctcccccttaaatttcagctgtgtgaggaggttgggcagatccaaacagacaagtccatagcccctataatgccagcaagggggaaaaaacagtcatagctctgtgaattcaaaactactagcctgatctacatagcaaattgcaaatttcaggccagtgagaccctgtcttgaaacaacaaaacaagaggggaggaggggagaggagagagagagaaattcccaggctatattaggtaaataaacaagatgtaatctaatgcatactgtaagcctctttagtgtaagaaaagggtgagaaaacaaatatacattttacacatgtgtgcataacaaaacactaggaagatagacataagaaactgccagggaagctgggcattggtggtgcacacctttaatcccagcactcaggaggcagaggcaggcagatctctgagttcgagaccagcctggtctacaagagctacttacaaaaccacagagaaaccctgtctcaaaaaaaaaaaaaaaaaaaaaaaaaaaaaaactgccagggatagcttcagcaagagcagagtgggggtgaaccactccactccaccccttccaggtattttgaatctcaaattctgtcaaccaatgcactttgaataaacaatttttggaattacagcagctctgcccaaagcagaactaggctgaaggccctggacaagcccaaatcacgaagaagcagaagagaaatatcacaggtgaaaacattccagagcccagcctagattgctggagcctggccaccgctcattttctccttctagctgtggcactaactagtttctagtttcaagagaataattattttcccagggggaagcagtgggcatgactcatccaccgatccacagtttcgagggaagtctgccccctgaacagcactttggaaatattcaaaagaaacttcttcagaaacaccagcagaaacatcggggctctaaccaaagccatggtagtcgtccacccctcttagaagtatgggatctctacacccaggtaagaggaggcagaacaaaggtcagcattccaaccctggcttactttcctcccttctggatccaataaaagttggcccatgccattttccccaagttcaggttctagagaaaagggaatgcaccaatttctggctcaccaatttcacattccccaagctcagctctcccagcatgtctgtgtatccctgcccactaagtacctcaggctggagctgtcttccactcacctagctcatacttaacttgccctttcttctccctcctgacagcggagcccatgatgaccaatgactcaagaagaacaggacaggactggagagatggctcagaggttaaaagcaccaactgctcttccagagatcctgagttcggttcccagcaaccacatggtggctcacaaccatccattataagatctggtgtcctcttctggtgtgcagatatacatggaagcagaatgttgtatacataataaataaataaaaatctaaaaaaaaaaaaaagaacaggacagtggcaatctgtttatggttcagaccagatggctcccagagagctcctactttaaaataaagccccaccatgggaatttccctgctccctttgacccactcttgtagggacagccttcttgcaccctcacaaaatccaaaggggtaatagttctagcagtaattccttcatgtctatgtgatgtagctattatctccattgatccccaaggcaaatgcaggaccagtattattactcctgttttatagctgaagagactgagccactagcttaaggtcacaagacagagaaaaaaggcaaagccaggatgcctgctgaggtggcccatgctaccatttctaacctcatttgcactaaccaaggcactccccgcccccaggtctaccttgatgatttcaaagtttctgggtccattcctccactcccccacccccaacgctattccctaggagccactgcccgggcaagcatatgcaacagcaccccaggctcccttgaatagtggtgcttgctcaaaatgccattgtcacaacccattcagaagtagtatgccgtagaaccaatgcaggaaattaggggaaaagaaaaggaaggggttagaaggaagcaactccaggaagttataagcctaacaactgctgtcactgatccagaagaaactgtatacaaaacaggaatatgggcgtggctaacatttctaagatatgaacgaaaatgaaataagtgatggctgggcaaaggaaggaagaggaggaatgcagacgtggacaagtagaaggaaaacgtgagagaggaagacccatggaaggatctttttttaaataagacagcagtagctcatatagttcttgggcctgcctcatgcctgagaggctggatctccaggagtcagaggactcgttccatccccagcttctacccccttgtaaactggaaaagtcatttcctctctcaagactcatttccttatctgtacaatggagaggagtgggatcacctattgtctagtccaccccaagagtttttagttctgtaacgacacaaaggcatgatctatccaccttgggtgcttttcccaaaattcaccaaaacgaactgcctttagaatacaccaatactgtaatatttcatctcctttacccttgaaacagattcatagagaacacggtccaacaaaactacccaatagttgtgtatgccactcaagaaccagacatagtacacccaagtccctggttttggtcctcggctctgaagggtggtggcggggaaaatcagacagataaatatacaggtgctgacacacaatgaccaaggcacaaaccaaccaacctcactctcggcctcatacaaacacacctcgagagagtcatgccccagcatgcgagcctggttgtttctcaggaaagggagtctacaaagaaacaaaaaaaactcattccgggcaagagggagggcagagttctggctctgaggagatccagccaaccaatagtcccagtctcccccagggaatcgtcactcagtcaacaaccttaattaaaggactcctcgctatttattcaagaaaggaattctcaatgctatgatttgagaaattttttagagatttcatttcttcttcagacgctgaaccccggcattaatcccaaaaggtccacaatgtaacaagagctagagaccccttctgcaaaagccaggaaaggaaacattccctacccccacctccattacatttcctccaaggacacttgagccaagagagtgcgggtgagaggctctgggtccccggagatgtcggaggggagaacgacctctcaggtgcatatggaggggaatgggtagcttaagacttgggtgtggaaggggtccttgggcttcaagggaagacgcagaaccgtggaccctctcagttatttttaaggctccccgccacagtgtaggaggtggggtcacagatcaccggcttgggggaggggagccaggcagtctccaggtgggggaggggaaagtagagtgaccagatcggggcgtaaaagtggactcctagggcgaggcaagcgagcaagcaggtttctggactcctcccttcccgttggcgcgtggggtgcgccttcgccaacctctgacccgacccaccaaatcctccaaaaactccgagaactcaccaaggaccatggaagtgaagagaaacaacagtttcctcccggctttcccctcggtgcccattacagttacaattcccacgcgacgggcgagccactgggctgggaagagcttcgcgatccaacgcgctgggactggactccagccgccaggttgagccctgcccgcctttctctccacgcctggtgggcggcgcccggctgtcccaagttctgattggtgaagagagagggagctccgacgactgactcaccgtacgcaggtgcagcccgaactttcctccctcttgagggcgattggtgccattctttcctagagacctctggttggcccagaagacagtcgcttaaggaagccaaagcctccttctcaacaggtaaagggcatcccgattggcagcagggtttgcagctagagcctttctgactggcccggggctcttgatagttatctctaaggaggaggtggggaatgtcacaggactctaaaatgcaggaatttgcttggtcgatttttccccctttacttttttttttttttttttcttcaagacagggtttctctgtggcttttggaggctgtcctggaactagctcttgtagaccaggctggtcttgaactcacagagatccacctgcctctgcctccccccctttacttttaagttgcttaatgctgcataatccctccccccacccccgccccttggtaagtgaaaaacacattaatatgggaaggtatggggagaggtttgggagagtattgtcctcctggttacattcttcccaaaagaaacctaatagagatacagaaaacattcagattttaaagctgacccacagttccctggatgactagagttatgtcttttatacggataccatgtgtcagtagctcctttgctgggccttacattctgcttggcttttgttttcttagaccaaggctggcttccatacctgaggctggcttcaaactgtggatcttcctataaaatgggctgtcccacaccaaagcacatgcctgtaattccagcatccaagaggtagatacaggaatattgggggttcaaggccagtcttaggtacctagagagttgtaggcagcctgggcttcaggagaccctgtatgaaaattagaagaagaggaggacgagaaggaaaaacaggaggagaagatggcagagggaaggagataaaatcaaacccgtagtgtctctgcctgaaatccagcacttgttaaagacagaggcgggagaattagagtttaaggatatccttgacaaggtagcaagtctgacaatagccagagttaaaagagaccccatttcaaaaataaaaaccaggctggagagattgcttagcagtaaagagtgcctgctgggctgggctttgtggcacctgcttttattcctggcagtagggaggcagaggcaggtggatagctctgttgagtgaaaggccagcctgatctacatagtaaattgcagtacagccagagctacaaagcaagactttgtctcaaaaagccaccaacaatagcaacaataacaacatgtctacaagcatctactaggtgagatagggaagtgcaaataaataaaaacagcagttctgtttaaaaaaaaaaaaaaaacccaaccaacaaaaaattctaacttcaaggttggcaagccataatagagtaaacaagaccctagataaccaaaaagacgcaactttgtactactaaattgaaacaagtatctgggtacctgccaggttcaaagttgttattcattctggaacaaatctaaagtcctaaagagaaagacttctacgcagttttgggatttgtttgggatggtctcattttagcccaaactgttctaaaactcactatatagcacaaattgtgagttcgagaccagcctggtctacaagagctagttccaggacagcctccaaagccacagagaaatcatgtctcagaaataaataaataaataaataaggtattgggagctacaataaaatggtggcttagtggttaagagtactgcttctctagaggacccactggacgccatattggtgttttgttgttgtttttttgagtcagggtaatagtcctggctgccctggatctagctctgtagactcacagagatctgcctgcctctgcttatcaaatgccaggagtaatggcatgtaacaccacacctggtagacccaatcttttatattttattttattttatttgagagcaggatgaaatagggatttactctattgtccaggcttgacctggcctctcgttttgtgcactaagttagccttgaactcttgacaatgccaggtggtggctcacacctttaaccccaacactcaggaggcagaagcaggcagatctctgtgagttcgaggccagcctgatcttgagttccaggacagcctccaaagctacagagaaaccctgtctcaaaaaaataaacaaacaaattatcttatttatgagtgccctatctatgtgtatgcctttatgccagaagaggacatcagatcccactagagacggttgtgaactaccacgtggttggtgggaattgaactcaggacctctggaagaacagccagctctcttaactgctgagccatttctccagtacatcagcttaattcttttggctcctttttgagttaccttgaattgtagtagttggcaatggcaggaatgtattcaaaagcaaagtcacacctcaagccaggatgcagagactgggtagagctaggctttccctgtgacaacctccaaaaaccactaagccgtcatacaagaaattccttggggctggagaatactgactgttcttctagagatcctgagttcaattcccagcaaccacatggtggctcacaactaccttgaatgagatttggtgccctctgctggcatgcaggcacaagaatgtatacataataaataaataaaatctttaaaaaaaatcctctgggaacttaaactcagtacttatgaagaagtgaagacagatggatctccgagtttgaggccagactggtctacagagcaagttccaggacagccagggctacatagaaaatccctgtctcaacaaacaaaacaaaacaaaatacagtttcactatttagccctggctggccttgaacttgctctaagggattcttagggtgactttcagtcacctaccctgatgaacaaatccaacacatggcccattggggcattcccaagccttatgccaactatagctggataactctctttttctttatatattaattgaaaatttcccatttgctgtcccttctgatttgtgtctttgcacatgtttgccagggcagccatatatcatgcagaagactttgcacatgtttgccagggcagccatgtatcatgcagaagtctttgcttggctgtttagatttactccttcggacttttgtttttgttttttgggtggttgcttggttgttgttggttgtggtttttgagacagggtttctttgtgtcaccctggttgtcctggaactcactctgtagaccagactggcctcgacctcaaggatctgcctccctggattaaaggcctgtgctactgctgcaccacatttgggttttgagaaaatttcactacaaagaccaagttgggctcaaactcattctcctgcctctacttatggagtgctggcattaaaggtgtgcaccaccacacctggcatcatcagctttttctatggcttctagtgttgagtcatagttataggtatgtctttacctctttaagataataaatggttcttggtagtttctgtattttcaacctttgatccgtacttgtattatatgaatatgaagtatggaacttgtctgtttattcacttacactgtgcataccttttccttttgctgtgacaaaatacccgacaagaacaacccaaggaaggaaacgtttttttaattaatttatttttatgtgtgcagtcttctgcctgaatgtgctgtataggctaccagagggcgccagatctcattcaaggtggttgtgagtcaccatgtggttgctgggaattgaatcaggccctctggaagagcagccggtgcgcttaacctctgagccatctctccagccccaggaaaggcttattttgacttgcagtttgagtcagtttgttgtgctggggaaagcctgttagagaaaacagctccagctgtggcagcaggagtgcaaggcagttgctcacattgtctctgtaaggcagagaaagatgaatgcctgtactcagtttgccttcttcttgttgttcactcctggaccccagcccaagggtccacatttaaggacctcaattaagcttcccaattaagtcttgttttttgtttgaggcgtgcgccaccactgcctggctactttttggtgtgtgtgtttggggagtttgaaacaaatttctctgtagctttggagcctgtcctagaacttgctctgtagaccgggttggcctcaaactcatagagatctgcctgcctctgcctcccgaatgctgggattaaaggcatgtgccaccgctgcctggcctgcctggattcttatatttattatttacacttgtatacatgtatacaaatccatatgttctatgtgagatacttcatggggattaaactctcaggacaagccacagaggaaaatttgctatatttgaggctggccttgaactcatggcaatctttctgcctcagcctcccaagtgctgggactatagacatgagccaccatacccggtatggccataaatcttgtaattcccattttacaaataatgaaagagatgaaatagttaaaagtgacttgtggtaactactcagttatggttagccagacctagaacccaacattccctttccacaataaactactaccgctcattaatagttctaactttcccctttgaaattactacacttccttactgaatgtatgctatgttctggtttcatggttagcttataagaatgaaataaagatccctctataaagccctaagcctgccaggccgtagtggcacacacctttagtcccagcactcaggaggcagaggcagtcggatctcttgtgagttcaaggctagcctggtctatctacaaagttagttccagaacagcctccaaagccacagagaaatcctatctctaacccctcccccaaaaaaggtgctaagcctggggagctggagagatggctcagtggtgaagaccactgactgctcttccagcggacccagtaattcccagcacccacctcacacagctcacacctgcctgtaactccaagattgacaccctcacacacaccctgcaggcaaaacaccaaatgcagacaaaattaaaataagtaaattagacttaaaaaaaagagctaagcctaaatagaaaaagagcaagtaattatgtacagtagaggtctatgcttgagccattctgtttagaatctgtgtcctcagaatccagttatacatattcatctgctatttttcatccttcctgagctcaaaaaccctcttgaggaggaccgaaaaactcctgccaagtacattctcctaattcttaggaaatccaaagggtttgaaggtctggaagcttcccaagcagaagaaatgatgagtgaagaccagggtcaaaaaggactatagtctgtttgggtcactgaggacacgaggctggtgggagcaagcactggcaaaatagtttgataaggcagggtgaagccaactctgaaccacagattgctccaagagtcggaatgagacatgtttcagccactaggcaacaaaggcctgcggtaaattatcaactctctggctgataaaatgttagacagccaggcggtggtagcacacgcctttaattccagcactggggagttgggaggggcaggtgatctctggattacagagagagttctagggacaggcagccacatttcagaagggctaaaatgagaagattctgaaggtcagtagattagcaaggctcaacaaacacctattgagaactgatgttctaggtgtttgaggtaaagaaagagtacatgccaggcatagtataccaggcatggtggtcactcctttaaatctcaacagtcaggaggcagaggcaggcagatccctgtgagtttgagaccagcctggtcttacaagagctagttccaggacaggatccaaaactacacaaggaaaccctgtctcaaaagaaaaaaacaacaaaaaaaagactttttaaaattacactccccttgcataccccaataaattcccctcctcgaagtttctccaggcccttctcactccacctgctgtgatgaacagatgaggggcctgagttaactcattaaataaaagactttgtgttgggtggtagtggtgcacacctttaatcccagcactagggaggcagaagcaggtggacagatggatctctgtgagttcgaggccagcctggtcttcaaagaaagttccaaccacagagaaaccctgtctggggagtgggggaggaaaaaaaaaagactctttgcttttgcattagaacaggtctctgtgattttggggttcagaatttgggcaaaacatcagtaattgttttgtttttttggcgaggggcggagtttgaggcagggtttctctgtggctttggaggctgtccggaactagctcttgtagaccatgctggtctcgaactcacagagatccacctgcctctgcctccccagtgctgggactaaaggcatgtgccaccaacaccgggcttatcagtaactgtaatcataaagaaatactatgatctataatagaggtaatgtgaggggtgtgtagactcaagatgaggagaaaaattaaacccagaagagatttcccaatctatttcagagtcagagactggggaaaaactgatacctgccatttaccagaccttgaggtgaataccattcatctccatacttgggctgggagaggctcaggagtggagcacctagtggccatgggcaaaggaaaactcaactcaacgatgtcgagtagcccaggagagagtaggctgggtcagtgcctgaggctggagaatccaggtgggtgggagagaagaggaaaaggaagggaaaaagcaaaggaaacaggaaatgtctgataaattgttttaagcacttgataatgaagggaccagctccccattttggcagccatgacagtaacacatgcttgccatgaccttgccttggtcactaagaggtcagatgcctgcctcatggcaaggaaccaatcagaagttagctggtggcgctatgctttacggctctgggtgtgctttatggacaagtgcacagcaatgatgcgcagagcatagcaaccaccctgggagggcctatgggccataacaaccagttggccaatcaacacagggcaagacctccaagcctggaggcacaccaatcctgagcctgtgtgtatcccctagacactccccttatgctgccctataagctctctatgcagctggtttgagctgtctttgctagccatccaccatggtgggtgggtgaaagaccccgagctaactagctcgttaaacaacaataaagcctcatgctgtttgtatcaagctttcgaatccgcctggtgactggggtgaccgaggtcctgggctgagatccaagaagcctgagctttggggggggggagatctaacaataaaagtagagaattgggttcacattgagccagcctgctcttctagctaaaggaatactttttttttttaagtttttttttttgggggggggtttgatttttttgttttttttttttttcaaaacagggtttccctgtgcatctccggctgtcctggaactcataggtgaggctggtctagcgctggggtcaaagatgtgcgccaccactgccctgcaaatcctttacattttagtttcattctgtgtgtatggtgttttgtctgtgcactactgcatatgcacctagtgactgaagaggccagaagagagcatcagttcctctggaactggaatgacagacggttataagctcctgtgtggctactaggaatcatacccaggtattctggaagaagagcttttcattgcttaagagctcagtgctcctaattgctggacaatttctccagtcccaaggactactttatgtggtttataaaaatgccttatatttattttatgtgttagtgtatgggcacaggtcacacatgtgaggtcagaggactacgtgcagagttggtctgtctttccttccaccatatgggtccgaaggattgaactgggtcttgaagcctagtggcaagagcctttagttattgacccatctcaccagcccgtatgtgaattttgttcatcttctgattggttttgcagatagggtctcactatgtaaccctggctgacctagaactcaccgtgcagatcaagccagcctcaaactcacatagatccaacttctactgcttcccagtgctggcactaagtgtgtgtcaccacaaccagtagcttttttttttttttcttttgggacagggtcttgctatgttgccatggctgcatagaaatcatgtagccaagctggcccacaattcagtgctcagcccaggttagaacctaaagaaaccctgcagccattacttctgcccaagagcaggacttacaattgtatactaccacacctggctaaagtatttttgcattacaactggggaaagagcttgttgcagtcctgaggacctgcattcaaatccccagaatccatgtgaaaagccagaggtgagggcatgcgcctgtaactctagcctttgggggacaaagacaggtgaattcctgaagctcaggctgccaacaggcctggccaaatccatgagtttcaggttcagtaagactcatggatttggccaggcctgttgggtggtgggaaactggtgaatgtcgaaggatcctgaggaaacactgagaactaggttaatactggaaccatttttgttgttgttgttgttgttcacctgacatattaaatgcctctaatacttgattaaatgcactttatttgagttttttttttttttttttttttttttttttttaatgcgcacaacaaggacttgcccaacccagcaaggtggctgtgagaagggtcacaaccactaacccttctacctagccctctttctccagccattccttataggccccgggatagtttcgagccctgtggagaaaaagggttttgaagaacaggtccagcaggcaatccccagtcagttcccagttagaaagtcttacaccttgtcataccctgtgtatccaagactttgtgccagctgtgtggcctggaagccccgcttgcccagctgacagaagaaaataagattcttgtcttcaagctttggcttctcagcactgtacaaagcttggaaagcagctgggtccatggtcaaggcgacttccaactcagacactgagaggacaaaatggagagccaatggcacattggggttcacactatgggcctaaaagagcggagtcctggccaatctgcacagatagtccaaacgtatggtggctcacaccaactcaaaaaaaaaaaaaaaaaaaaaaaaaaaaaaaaaaaaaaaaaaaacaagcaatagccagcagtgcaggaagttaggccgacaatgcagccggccactttgagtcctcaggaggcagtaaaggaccaggtgggttagggagtccagcttcatagcgctgatctgcccctctggctgcctgttagcccctcaaactggataagctagttccattgccaggattctccattcagcttttccctagggaacctgaggactggcttgaacaaataaaaggccacccctattgtccctgccctaaatgaggcgaggcccctttagctaagaccatcatggactgtccctttgccaacacaagaaatcctataccagggatgttgagtgccccggggatggtaccagcttctgcttcctcccgagatcgaacatcgaagagccgggccctgcctgaggctaggagtgaacggagttcagagaacgagactgtaggcactgaggaagaggacatgaaagaactgagggccggggaaccacacaaaacacctgtagcctgtgcaccctccctgggagcttcccgacccagtggagctgtttacaaggactgcagccacacccccgtgctcctctctccacaaacaactctacccaagggaccagcatacacaacctcacccccacatccttctcaggtacctccagtcatggtcccagcagaagcaactgtgtgactgagtcgcaggagtgcaacccgaagcatctccccttccctgaaccagggaaaccggaaatggaagcaaaggtgtggcccctggctggcacacaggcagaaccccagtaacacctgttggtgatactccaacaccagcccacagttgaatcctttaaaggctacccagtgtaggccggaaattgcatccaggtttggcacaggtaccaggaccctgggtaatgagtataggaatagtagcaccccacccaaaggttgacccagccctcactggtcaaagggcagtatacatcttcccttcccccagccccacaaaagaaggaaaacagacaactgtggctctaaacaattttatctttaaaaaaaaaaaaaaaaaaaaagaaaaaaaaaaaaaaaaagaaagaaaaggaaaagaaataaaaagaaccatccccagaagggaaggctctcagtgagcccctgcctatctttctccctggcttcagacttctgcagaggccccaactgctcactggcctctctactatttatgggatagcagccacctagcatccttccccacttcttgagcaagcctgctccccagagtaatcaggtgagtatcttaacttctgctccggggaaaggaggaaccagtgggagtgctagacccacagagtgtccgcagaccctctgctgggcactctaagcaagcacaaggcaagcccagatttagtgtgtccagtgtccatggatagagcacatgcaatgtgcaaaaggagcacaagggcccggggactgcacagtgggagcaggcaatgtgtcagttaatgtccccttcgtgtctcacaccactcactgcagactgccacaccacagggcctcagttcaaagacacgcttgccaaactccccccagtcccacgccagaagtaggcagtgggggcaaagggcgtggggttattagcctgttgctcctggaatatctgcagttctagggaccaaagcccctggatccccacagttagttgctgtcattcttgatgacgacctctaatccatggtgccgtaactgagctcgcagtagcaggttcttgtttttaagatcttccacctgcagagagaagagacagtaagggaaatgacagggaaaaaaaaaattgatactgctaagccacaaacttagtcacacagccagtgctgaggacaccgtgaagtgttttctagggaattcaaactgggtcagtggctacagggctgccacgggggcctgcctggcgcttgtctgacctgttgtcgaagcacatcattgtccagctgcagctgatctaagccctgcaattcttcagacaaccggtggttgctctgccgcagctcctggatataatcgcaggctttggataggattccacctttactctgcaaggcaaagccaacaaaatgaggacaaaggcttaaaacactagcttaccttccaagagcacactcatactttcagcctgtttcccctcagaatggtgatacagtatctcagagtattaagaaaaaaggactgtcatgagcactactccccaccacttctgaaaacaatgccaggagacacaactctagccccctccctgctaccagggtctttccatgacctggccagacttggtgctctccatagagcagtctgggatgattttggacagctgcacaatccagttgttgatcttgtcccggcgacggcgctccactgtgggacaaatggaggacaaagtgactcggtgaaagacgagcagcccttcctgccctcacatatcacccaagttcccaagtctgcttcggctgctcctggcttcccagctggatgcccctaccttcattatgttgagcccttcgcttctcatctcgagttgttctgggagcctctgacttcctgatagtaagagtccagggtgaccagaccaaggaagacaaacaagcaaaaaagactgtttagggtgaagaattatgcaaaattagcaggcattaaaatcactcaaaatgactaagaagagataaggtcactcacggggaataagggtgggtcctgggggcaattgaacgctggctccctccctgcaatacttcttgtggtgacatcattacaaagaactgacctgtgaagagttaggtttttgtcaggactttggactaggaacctcatcaagacctttggacccatctgagagcatgctcccatctgctggtagagcagtccagacccactatatgctgtttttatttttgtttttttttgggggggtgggggggggttggatattgtttttctgtaaagccttggctgaactgcaattcactctgtagatcaggctggcttcaactcaagaacagcctgcctctgcctcccgtgtgcttggattcaccaacgccacctggcaaccctgattttaatagtaactaaaagtcaagcactaaggtccagagccagagccagagccacccccagccccgccctactagctgccatcctgtacagtatcttaccagtgctgggaggggttgcctgccccagtagtgcctctgagccctgggtggtaacaacagcagttgtacttccagatgtggtacccgctgccccatctcccaccgcagcgctgggaaagtaagtgtaatgtgtttcagcagctgttccctccgagtcaactgcatcatcactggtgaaagcaccctggatcactgcctgagaagggaaatgagaacagagtccaatcagtcagggacatagtcccaccctatcaccctgaagtttctatcccttaccagaaggagaaacatcgagagccatgtggccaaagatgaatgaatgcaacccaacacaaaattaaactcacttatttaaaatgagttgtttttgtttttttaaatccaattatgtggggttttttagatttatttttatacatgagtattttgcctgcatgtatgtttgtgtgtgtgtgcctactgcctgaggagacctgaggaggatatttgatatcctgaaacgggatggctgtgatccaccatctagatattaggacctgaactcaggtcctctgtaagagcaaaaagtgctcgtaactgctaagcaatctctccagccccaactgcatggttcatgggcataatctctgtagatggcagggtcatgtctcagtgacaaaaggttgaatacatctgaccctagtgctttgagttaaagctacccaagatgcaccccactgttcccaaccccacccctccttcctattggccccctaatttctcttattgttaaaagctctctagtcctctcacacccctgtacctgggtcatagactgagtggcagggtagccactgatagcgccagtgccctctgtctggccatccagctgcccctcagacacctggatcaccctgtacatcacctagaaacaatgaagagggggagcggtgggaagagaagacaagagtaagtgcccagaatcctaggccctctcagaaagttcctcttggattgagtcccaggagtctctcaaaaaacagagtcagctatgggtcccttctttcctcattttgagtctttaacatacccagccccacaccaatctctactcttagcctattaacatttcatcccaatagtacacagattcatctcattgtccaagccacagctccccaaaatatgttcagacacctcccttgatcccaatcccaggtaacatctgcagccacctggccccctcccttacctggcccccattctcagttcggaagacgtacttgacgttgggatcagggaaagtagcagctgactggatgctggcgatagctacactagttgggtcctctccagtagctactgcacctaaattagaagaggcaaagaaatttctggcttaactgcctttctccctgttctacttgcatgccatttaagacactggtacacagaagatgggcccagaatcctagaagatgggccagtcagctgaaggaggagggagctatgatgggctcttggtcgattttagcattcaccttcctgaatctgcactgtcccctcttcggtttcagctgttttctgctgcctgtttgtggtaaaaacaacacaaaaggaagatgtgagaagctcactggcttagtaacatggttcccaaactcactggcactcacgacagacattaggttatgtaagataatgtgttttacgacagataattattgccagtcatggtggcgcacgcctttaatctcgacactacagaggcaggtggatctctatgatttttgaggccacctggcctatataggaactacagggctatatagatatatattctgtctcataaataaacaaacaaacaaataaacaaataaataagtaaacaaaacaaagactagtaaactaagtgtttaccatgtacatagacattaggctataagcacttttttttttcctttttggtttttcacgacagggtttgtctgtgtcatcttggctatcctggaacttattctgtagatcagactggcctcaaactcagagatcagcctgctttggtcccctaaaccctgagattaaagaaagcatgcatcaccacacctggcatactatcctgatactaataatgacacattaaatcaatagggctattttatggataaggaaaccaaatcacatagctgtaaatgatggagctgggggacccaaatccagttctgcctgaatctaatactcttagccattttgcattctccaaagccattccctctctcatcccagacactacgtcttcacttaccccttcatctctctgtgagggggctcatccgaggaactggtctttttttgaaggtcttcgtatctcctgattcaaaggcctgagtactaaatcctggtggaaattatagagtttacggtgaggctaggcaactgaacagcgttccaagttctggaacataggctccaagaagacaaagccaagaaaataaaccaatcatctgcaaagcccaattctaacagcaagggctgacccacagtgactgaaaagcaactcttgatgagatatggtggctcacttctggaatcctaatgctcaagggaatgagacaggaggattggtgcaggtttgaggctagttttcaatatagaatgagaccttggagagaaaaagaaccaggtgtgcttgcccatgcctgtaatcccaatactgtggaggcagaggcaaaagaattaggaatttgaggccatcctgggttgcaaagcaagttttagaccaagttgggttacaagaacttgtcacaaaaccaagcaacaaacaaaacccaccatcaactggggagatgactcaggggcaaaagctcttggaatagaagcctgatgcctgagttctaaaacctacacaagaaagggatgctgtagtgagggcatctgtaagtcacagtacacctcgatggacagatgagaagcagagatactggaagctgggtggcaaatgcagcaatgaagactgtctccaacaaggtggaaaggcaaggactgacacaccaaggctgtcctcaaacaaaaaagaaaaatcaggctattaagatggctcagaaaactgggcagtagtagtgcacgcctttaatcccagcactggggagataaaggcaggcaggaattctctgagttcaaggccaacatggactacagggcacgtgatgtggaatattattgtaactaggcaaagatgtgttccatttgcttatgttgcacttgtctaattctgtaagaatgtgctgcatttgttaaaccatgtaaagatgcgttgctgtttcatcttgccttcctaagacacctgattggtataataaaaagctgaacagccaatagctagacaatagaaggataggcagggcttcaggcagataaaataagtaagaggatctaggcttggagaaaagagaacaagggagtaagagggggacagcccagggccagaagtcaggcactgccagacagacagaggaaacaggaaagtaagatatatagaatgaaagaaaggtaaaaagccccaaggcaaaacgtagatgaagagaaacaggttaataagttataagagctagaaagaaacggcatagccccactccacccatgatctgctggagcatatgaagacctgaccctcagacccaaagcttcaggatacccacaacacagggcaacaggacaaccaagaggagttccagtgagggcccagcattaatagtgtagcagaaagcagaggcctcaaaccagaccaatgattctttgcaatgaacacttgcaagtaaagagatatggacaaaaaaagggggtatgctgtgtgactcactatgtcacacctcagcttccttgatgagattttaaattattcctccccccttttttctctgaaattttatattatttggggaggggtgcaaaatggatttgaagggggcagggaaatgaatgggatcaaaatacttgatgtaaaaagatacataggataaataaaaagaaaataaaaacaagcataagataaggccgaattgtcataactaatgttaaatttctgactcgccctgtagaccaggctggtctcaaactcatagagattcacctgcctctgcctccctgagtgctgcgattaaaggagtgagccaccaacacccggctataacatttttaaaaagcaactttttaaataatgttctttactccttatttatttatctattggttggttggttggttttagtttcaactgggtgtctctgtgtagctctggatgtcctggaactcacttgtagaccaggctggcctccaacagagatcctgcctgcctctgcctccctgagtgttgggattaaaggctagcactgccaccgcctggcggctcctccatattcattccacctccgaggggtaggagataattatactagaaggccgagaaatagtatgtttcaaggtgcattattgaagcaattatagagtattactaaagctactatagtttcataggaatagttagggtcatgtttaggccaccactaccaaataacacccaccatggtgcccttcttagacacaaactgtacaataagaaattctaagcagggcggtggtggcagagacaggggcaagaggcaggcagatctctgagttaaaggccagcctggtctacagagtgagttccaggacagccaggactacacagagaaaccttgtcttgaaaaaccaaagaaagaaattttagtcctcaccaggcattttggtcctttagtcccagcactcggaaggcagagacaggtggatctctgaattccaggccagcctggtctatatactgagttctaagacagccaggggtatatacagagagatcctgtctcaaaataaaacaaaacaataacaacaaaaaagaaattccagtcctcaatctcaaaagggaaaaactggaaccctctttttgccactggaaaaccatcactaaccacaaaacctagatttggctcttgggtatgattctactgtcagggatcttgttttgggggagttcagatttacagcatctgttacaaactctaaagcccaagtgcatcatattcaaggctcctctattttattcatcaaggcttcctgtagagaaacacagttgctaaaatgttgccatgacaactccaaatcaactaagcctcaggaggaagggggaaaaaatccaggctcggggttctgaaggagaaaagacaatgggggaggaatccatctacaatgtttctgccttaggactcttgacaccccgccagagaacagaaaaacaaagaactgagcagacagatgcctccagaaagaaacagctgcacagtacaaagcaataaaatattctcaacaagaaaggacaagatttttgtaagttttccacccataaaatcctccaaacctttctaatccaaagaaaatcttagtttagcggataataagccttggaaagcccgagagcaaagaaaatggtaacaaaaataacaacaaaaaggaactgaaagtgaaactgaccgtccaaagtaacgttgcaaagggaggcaagcaccagtgtctagggaccacctaggtctctatcctcaaaggccaggaggaagagcccctccgaagcttgttgcatggcctgcagaagcaggcaatgaagagaaggcaacgcacaggaagcaactgtatagcccacagctgtcagagcaacttcgcaggccacccagcaacggcggtaggctacttactcaaatcttggttatacatccggaagcgtttcctgagcatttaagaatatgtgacacggaaatcagcataggatgttgtggtttgcacgctcaaaaggagggccaagcaaacgccctcgtcaagcacagacgcaaaagcaaaagcaaaaaaaataaaaagatcaagttctgaaagaatccaggcgccaggaccttgcctgagaacgaggcgtctccctgcaggcccaccaactagcgggaggcgctcggggagctgagcaccacccgtcaggcgcgagccccgaagcccacgcggtgaccccgtcggcccagccccgctcgccccgctcgcccggctcgcccggctcgccccgcgccccagctgctccgcaaaggagacagggaaggacgccggggtccccccccaggcctgcggctggcagctgcggcccgcggcgggacaccacgggagggcgggacgtgtgcactcccggccggggagcgagctcggcccacaaagcagggcaggagataaagagccaggcacggccccctcccccaaaacaaaggcttcgagccccggcgctgcctgcccgggggaaatgaagcaaggccaagctgccccgcctcgccgctccacctcgtccccaggctccgtctggctccgacgcactcaccgacccgggccgctccagtcgccgatttcccccggcagcgttctccctctttggatctaggtctctccatagacagctgctcatgcgcaatcgcggcctgcggccatgttggtgaggggcggaagtgtctcctcgacccgccctgcctaccgaccgccccggaaccgccccatttccgttcgctccagactgggatgcgcgctaaagccgacgtgggtttgtgagtttttagaggcccccaagagaagcgctgtcctcgcggacgtcgctggagttctagctgtttgcagcaagaaccagaaacaacaacaacgacaacaaacaaacgactaaattttacttccatcttggtgctaggcggagcctttttagttccgctaaaaggaagtaggggccatctttaacaagggcaatttgggaagccatcttggatcagggcatcattttgaggggtttccaggtggacactgggacatctctggacatatgtagatctgggtttatttatgcctttgtactagcgtcagacctcatgtcttccagtttttctgaggctcatatgtgacatttttgattaccattttttaatggttttggaatagtgaagtataaatagctagaattcatcagaccctgatctcaaatccacagctgacacttttcttgagacaggatcactatgtggtgtggttttctttcttttctttcttttttttttttttcaagacagggtttctctgtggctttggaggctgttctggaactagctcttgtagaccagactggtctcgaactcacagagatccgcctgcctctgcctcccgagtgctgggattaaaggcgtgtgccaccaccgcccggcgtggtgtggttcttaactatcttatgtagatcaggctgtcccggaagtcacgtagatttgcccccccccaacacacacacaaattacacacacacacacccgatacagcctctacctcctgagtgctaggattaaaggacatgtgccaccaagcaccggaaactgtcacttcctaattctgagatctttgataagcattttcacttaattacagcttagtttcctcatctgtaaaatggaaatactaataccaacttcaccaaaataagtggattaaataaattcaagggcaaagtctttatgaacaccccaattcctggcattggatgaacattatgtaaatacaggtttctcttccccatttcttgaccaccacaagcccagttctactttctaactacaggtttccgtgacaactgaggaagaaactctaaacaagatatatacatttcggcagcattcaaatgtgatacctttccccccaagactttaataagagtaagttcatacacttatttaagtgtaaaaacaatcaacttttattatcaaacagctatcattgctaaatggggcctatagcccccacctgtgcagagaagcagtgccaggaccagagtgatgaccacacatcctcttttctgaaatgggaggaggtggttattctaatgggaaaaagaaagaccagagaggtctgtacaggacctcttctgcaaataagtgaaggcagaggatgtcatccatttcctccagtgaatactgaggccttcacagagcttcttggacatgtttctcctaatggagctaaaagggtcaggagacagccaaggatctgggagcaaatcaggggtgagcaactctgtatctagccctgtattctccatatctaccctaggcttctatgaagagaagttcacagcctcagaagagggcaggagtttggctggaattccccctatgtatttaaatttaagaaaaaaataagtttctacctaccgtatgtttcgttaataatcacaacttcatgagtaacaaggccttcctatatttcttaagactctgctaagagataagtgctttgtgtctaacagaaactcaaggtgaacccaccaaggcagtgcctccatggtcaaaacagatagctggaggacccaagcctttggaatggggcattgcagctactgagggtgtaaagacagctaggcaggggttccagagattgatgataattttctggtccctcttgtcccatcctaatcacagcccttctttcccacggttagtctgtgtttcaaatgcatatgtctgacgctgaggggacataagagggacaggaagctgaagttctctaggtggcaaactaaaccgacccctgggctcagacccttctgtgccttcaggtgggagttccagacagctaaggggccgggaagaatgggcaggagtcatgctacaaggagaggttctagagttgaggctataatcaccacccccagtacaagtctgggtccgccgaattccctgagcctcagtcctctggcgttcccgggccagggccacagcagcatcaaaggaaagactacccccattcctccaagaagcacgagacccccaagccctttctccaggagtcccgtcaagcctaccaggtcttggacatgggcttgcaggtgctacatggatcttactacacattgcattgggcatcttggcaaactgtggtttggggggcactacaggaacagagcggacctgttggacctgaattagggtagaagccagacgcatgcccacaccaccacttgaaccacagggacaagaatacaggtcacatgcctctggactgagctgttcctcagcctccatcccctctggctcagatggctgtggagggccttgttccatctgagaagactgttcattgacttcttctgtgctgtcaacctccaggaactctacacctggcccttcagagaaggtcccctcttccaattggtcaccaacagctctcttgccttcagttcctatatctatacttttctgttccttgctgacctccccttcctccccatcttcttcttctgggcttccactagctccaccatgtcctcggtcttctcttggcttgtggtcactattctcatccttttcgcctttctcagcctctcgtgtgtgcacagcttcccagctctccccacgaagcaggttatcctggactgaatgttctggatccattccagattctacagggatgtcctctcctttctcagctccttcctttctcccaatttcgctctccttcttgtctttatccccttctcctcttgtttcctccatatccttagctcctatactttcaacctcttgacctttggcgttttcttccgtggtctctatctcttcatcacccccttcttcaaaaccacccatcaccttttggcttatttcagcctctcctcctccctcatcggccttcccagcttccatcccaggctctggaattgcctctgcatcttcccggttatctgatgtgcttccaggctcagcctccttgttctcttcagcttcccagcatgcctgtttctcttcagcctgtattggaggttgtttctcacaccttgctgcctcttcctgcagactcccggcaccctcccagttcatgggtctaggtcctagaaggggactcagatcatcgtaggcactcaagaagatttcttccccattgtcgtcttccgctccaggtgtggggtcatcaaaatcaggggaacagcagctaggagccaggacgtactgtgcatcttccagagacagatcatccaggggtggctccacagagaactcttccacctgcaggcatagcaacggctaaggaccaggcagccccatccactccctaggctacactctacccgcatacccagcatggctcctccttacctgaggcccatctcccaggatctcctccaggtagcccatcccagggtcgtcctccccaagggagaaagctgctgctcctgctgctcctgaagctcctgccttggccacttccctatcctctacccccacccactcaggctctgagctgctcaagtcctctaggaaggagaaggaatcctgcacctcctgggacaaggagtcctccagggcaggagtcatgtcttctgggcttgagtcagccaggggacctgggactgatcttgcctccgacttctcatctgttgaaggaaaagatgttccagaaatccaaaagtcaaggtcagccccaaccctttctgatatgggtatttctcatagtgatatgctaggggcccaacactcccagtgtataatagtcaccctggtctaagaggatgagccatatggactaactacttacagatctctttattaattcttactcaagtgccaagccttgtgggttgtttgtgaatttctttgttttgcagtgacttttttttttttcttgttggtttttccagacatggtttctctgtgttaacagctctggctatcctagaactagctctgtaaaccaggctgggatcaaactcacagagatccttctgcctctgcctcccacgtgctggaactaaaggcgtgcgccaccacctcccagcttgcagtgacttttaacaccaacttttgtacttacccatacttgtatttactaaatcccctatgtatctgatttagacccctattcttgggggtaaataagtgacttgaaacctggcagaatcccttctccattcacttcatataacctaataatattactgaatccccaaaccccaaatctaggcagtcaaggtaaagggctgaagcctctgaccttccaaggctacatctcagttacagaacttcaacctaaagttctggatccccttcaagccctaggcaatctccaagttctcacctggggggccagggcctgggacaggacctgaggcagggctaggcctgggctgtagagcagggcactcaaggccacgggtaagcctgaccaaggagacattagagatgatgtttgggggtacactgagaatagaggttatgtgtagagggaggttgacgttgtaggggtctgagatgtggacaccggcacaacgctccgcacgactactccccgaggcccgaatagctgaccgcccagctcgtggagttcctggctcagaattcgcacttccggatgcctctgactcaggctcttgttcaccctctgctgcttccatagaattactctccaagttctcagacaccagtgagcttgactgagaactgctgggccccaccagtccctcaggttctgtgggagagagacagggtcacatagtcagtagcctcagctccaaaggccttgacagctcctaagtaagtctcaacagttctggtttttttgtttgtttgtttttttgttttaggttttagaggtaggatgattggaaggtaccagccccagcttcatttggccactactgcaaattatccacccagttagcaggtcaaaggttacacatacctcttccctcgctgtagtcactagctaccactaacacacacacacacacaaactcagagtctccaagtacaaatactcatgaatatatccacagattagacaataggctcatctattgtaaaacttggcatctgtctccaagactggtatataattattcattgattttcttaattactggatacagttggccacatttatagacacacaagcctgcattgttattgtcacagcacacacacataaccactcacacctgtactcaccgtcaatggccccagctgcagcactcagtgaatccatgctcttagcaggtcgcagcacccccttactggatttttcttctagaaatatgaatgtacatagcaccaagaccttgcacaccctcagcagagcccgattccctcatcatcccagacctacccctgtcctcagtcctcaggggaagtttacgttttgtctcatggccagagcgacccaaattgaagatagatcgccatttcctgaccttcaaagacccctttctcctgcagataatggagatccaattaggagtggagtctgggtggtcagtgcaaagggagagattccaaaaaggaggccttacttgtgttccgcgatctcaatgatagtatggtagggccggatctgtggaggtccatcaccagcctgtaagatgctaggcaagttgtagggcagagacctgggcatgttgtcttcagaactgcctgatgcccgggcccctggaagtgatttccatccactctccaaatctgcaccagttaggaaaacgaaaagaattgactagtcaacaacagagccaagacaggaacctcaagtccccagaccatccaccctcaccaacaaccaagctaaagctcttggagatagaccctccctatccatttcagacgggtattctcaagaatgaagagaagaaccaagagatcccaagacattagtcttggcatccaaggtggtaatgcagagaccaagctgtatgctagaacggcagtagaatcggcctgctgaagccttggctgtactgatatttctccagtgttctctgatgtgattaccacatacctcgctctgtgagagtcccagtcttccttcccacaaaatgagaaaattggtcttagtcaaaaccagaaaacaactaaagctcactccagcagagagcggtgataggtaaggggcagaaagggacactaaccagaaagggaagcacccccaaagagctggtccacatgggtgaggatgaactccacaacaatggactgcacacgcacctccatgaaggctgctgtcccattgaagcctgaggcctctatgtccttagacctgtaaatgtatggagttagtccctcccaagtctcaaaacactttcctatctaaagtcttctgaacacacacacacacacacacacacacacacacacacacacacacacacacgagtgtgcagatgacggacaaggtttagttatgtagctgtcactgtagccggactagaactttctgggtatatatacaaagatccatcttggactcacaaagatgcacctgcctgtgtctcctgagtgtgggtggaaagtcatattacagaatgcccagcctctgaaatactctattctctctgctcttgcttctcacctccatttctacctcttaaaccgcaggtattattatttaagttcagataccacttcccccaagaaagccatcttagacaccctcaagtaatctctactttcatttttgtttgcttgtttcttttgttttgtttttcgagacaaggtttctctgtgtaacagctctggctgtcctcaactcactctgtgggccaggctggcctcgaactcacagagatctctactttctttcatactccttgcactgtcgaaccaaacaatgaattgttataattatgagaattgttataattaataatgatttgtgtcataatgagtgatgcacagcccaattcttgaatagattatgagatgtttgctcaggaagtgtcttgcaaataccaatattctagtccccaaagtccacagcacagtataaagaacaaaaggccttgctcttaagaacttcacttggtctcagagaaggcccacgttgttgacggactttatattactcagctacgctactgctgaaccatcctgtcttgctgtgttgacacgatccccacaccctctccagtgtacccacacaaccacatccacttgggtatatccttcaatatcaaagtaagtctctcagcagctacacactgatctgcatgcacccacctcagaaggttgggggcccacacgattgccaaatttcgggcatgcatgttggtttgggcactaaatgaggccatgtggaccaagtgcctcataaggaactccagcgtcctgcagaaaccaagaaaagaatcacctaaaaaataatcgaggcagggatgggagagacgagccaggtgggagggggcagtgtctctggaatacagagggtggagccctacacacctgtagtttggggcagggagttcttgaagcacttcaaggatcttgatcaagcgttctggctctagctgcactgccactgcctcctagttggggacaagggtataagaagacattgactcagaggtgacccccttgcttctcagaggtccaagttacactcaggaacaatctattgctatattctacagtggtcccatctagatcttcaaggcatcataaaatagtgaaaacacataaatatgatcccagcactcttgaggcagaggacaagggctggaatgtagcctagtggcagagtgcttgcctagcatgcacaagaccattggttcaatccccagaatcacagaaagaaagcttaggacctttgggctcacaaatgactgctgaatcttatttatacacttaatagtctgtcttgtgaccttgagcaactcactgccattcccttgcctcagtgtccaccttagtacagctctgaaactagacccttgaaaggtgtctgaatggactgaataggctctggttgctattcagagtctcagtgttgttgtactcagtaaaacacaagctcttttggcaagtagatgggattttgctatattgcccagtctaggctcaaattctaggctccagcaatccttctgcctcagcctcctaagtagctagctaggactttactttaaaagtattactcagatcaggacatcattcttgtcacgtgtcttcttccccaaagctgttgaagacacagttacatttgatggagggacattcctgaaaatatttttgttatataaatagcatttttgttctcttaagtgtagggaaactctggtctaggtgctttccaaggcctcccagctctgacaacctgccctttacctcccaagtctcagcactgtgctgtgtgcagtctgcaggccttaggggaaatacaccatagagagaaagtgaagacaagagggacaggggttggcagaggtgaccgggccttgaagaggtctgggaaggagggctcttctcagtaatgctttactgtcactcaggatcactaggctgccatatgacacccctgtgatgtcaaaattgaagtggtggcccttgaaccctgtcttcgacccctccctccacctctcaactcacagcaaacttgtcatagagccggtaagtgaggaggggatctggcagttctctgaaataggccttgcacaaggaggagacacagtgaatgtcctggaggtagacatctcgccgaaggtctggcttccgctccacctcgaactcctgcctggggaggtgcagagtggtcgggagtgctaaaggtcagacagaggatacgcaaggagaagtaggacctatacaggtcagctacaggaaggagccatggtccacatgtgtgagacttgaaagaatattgggacatacacatatgcacatgtatatacatattcactggcatatttacatataattcctatatatgtcaagaaatattaggaatcgaatatgtggatatatagatgtgaatgtgaagatgggtgtggagataggtaagtggatctgtgcatgactaaccaggatataagattagcagtgaagacgtgtgtaggaatcagtagacacaggcaatggacttaaatgggtctttcctttattcctttttttttttttctttgagaaaaggtcccactacatagctgtgggtggctggaccaagttgacttctgactcacagagatccacctgcctctgcctcctgaatgctggcactcaaagcatatgccactatgcctagcctgggattgatgcttaaaataaccatggtaagtcttcatagtcttgattaggttagccagcagttgttcagacatggcatccaaagtaccaacaaccaaaagaagaagatacataaatagatgatgcaaattctcctgagacaggatgatttccatgaatttgggattagcctatgctatataataagttctaggccagtctgagtaagattggaggaaacagagagagaggtggggcagacaagggtccagggagatacctcaagtgataaagcataaggatctgagttaggatccccagcacccacagaaaaacccaggcacagcagcagaggcctgtaagctaaacactggggaatcccaggagcttgctggccagtctgtccagccaaatctgaaagctgcaaggtcagcaagatacatcgtctcaaacaacaacaataatgtagaggggactggaaagacgctcagtgactaagagcactgactgccagctattccaaaagtcctaggttccatccccagcacccaaatggtgcctcacagccatttgtaactccagttctgggcctcatctggcccctgtgagcactaggcacacacatgatgcacaggcattcaagcagacagaaccaccaccaactcctggcctagaacatataatcttattacaactcagtgatttaaaaatattaagcagcctgggtgttggtggcacacgcctttaatcccagcactcgggaggcagaggcaggtgcatctctgtgagttcgaggccagcctggtctccagagcgagtgacaggataggctccaaagctacacagagaaaccctgtctcaaaaaaacaaaaacaaacaaaaaaaataagcagaagtctaaaatttgaggcatttcccaaaataagtgcatgaaaggtgttcaacctcatctgtagctagggaaatgcatacataaatcacaatgatgtatcattacacacccaccaggattgctacaatcagaaagacagtaacaaatgttggcaaggctttggaggaattggaaccatcatacattgctggcagggatgtaaatgctacagctgttatagaaaacagtttggcagttatttttaaaagttcaacatgaagttacaatatggcccagcaattccattcaggtatacaggtatacattcacaataactgaaaatacatccataaaaacttgcacatatttgtagtagacttatttataataaccagaaggtggaaacaacctggatagctatcaactggtaaattggggggggggaatgacttgttatgtagctatgttggagaattgtattcatctatagaaaacaataaaatactagaacatgccacagcatgcatgaaccttgaaagaactcagtgaagagccagacttacaaaaacatgtatcactggtttatatgagatttccagaacagacagatccatgcagacagaacatagaggttttttgttttgttttgttttttggaggatggtgacatgttctggaatcaatggtgatggttgcagtgttgtggatatactaaaaataaatgaatgcgaacatttttaaatggtgaattttatagtatgcaaatcatgtgtgtgtgtgtgtgtgttaaatcagactgtatatgtgggaatggaaagagttatgtgtgctgggggagcgagcttggagtccccaccttacctgaccagactttagagcctctccctggaatagtacctcatgcttgtgcttctttctcccagttcctctcatccctcctccagctctccccagcagctgctcccatggctccctgcccacagaggctgtccactctgtctgactcaccggagcttctggatgttagaggagacccctgagaggcggtagatcccatccaccactccatactcttgcacaaactctgcacagctccttagcacctggggcactggggacacagacaggtagaataaagaaaatctgaaaagctaaaaactgtaagggggtctgagaaatgggagcatcatggaagaggagtcactgagcttaagggcaaaacttatgaaataaaaacaactcatttgaaaggttctcacaggtgaacagaaccagctcacctatctttgtataatatttttatcccatggtcctggagtctcagcataaacccctgtactgaagaggaattcactgctattcaatattaacctcggttctatctcttccaaagattaaaaaattaaaattatgtgtaggtgtctgttcagaggaatttgcatatagtgctggtgcccgaagaggctagaggcatcagatatccctggagctggagttgtaggaccttgtgaagtgcccaacgtgggtgctgggagctgaatttggaacctctgcaagagcaataagcaattttaagcactgagctgtctcttcagtcctgcctctgtaacaggctctcttggaccaccaatcagctccccagtcatgactcagagacttattagctatgaatgctcggccttatcttatgcttgtcccactagctcattcctaaattcaatgtgtttctcttcgtctacattttgtctcagggcttcttagacctctctttcattctgtgtccgactctggctggctggctggccctgggtgtcttcctctttttctccctccttctctcctcctcctctctctcttctccagcttagtctctatgttcaccagctcggcttgtccctctactgtctagctattggctgctcaggtttttattaggccaatcaggtgccttgggcaggcaaggtgaaacagtaacccatctttgcccttgaactaacgcagcataaacaaatgtaacatctttgcatcattaacaaaggcaacacatctttacctagttaaaaatgaagtggaaacaaatgtaacacagtgttgcctaattaaagtaatagttcataaggcagctctacctccgtttgttcatttatctgctttgaaacagggcatcatgccttcatcttgctatgtagttgaggaagaccttgagtttctgtctacttcctgagtactgggattataggtgtgcaccatcacattcactttgtttgttcctgagagtctcacctaagccaggatgaatttgctgtgtagctgaacgtggctttgaattcctgatcctaccacttctgcttccggaaagctgagataataatggtgtgtcccacacttgctttatgtgatactgggatgaaacgcagggcctatgtttactaggcaagcactctgccaaccaagctacatcctcagtccccattttcgtgatatacactcagtagtctatcttgtttattatataaaatttacacagaaaatgatgggctagggttgtagaacaacaaaccatttactacaataactttacattctattttcacagtttatacatatttaacagcttatatataaatccagatgacaaaaaccttaaaaattaattagcttaaagataaataattaagctgggcatggtggctcaggcctttaatcacaccactggggaggcagaggcaggcggatctctgtgagttccaggccagcctggtttatagagagagtttcaggacagtcaggattgttacacagaaaaaccctgtcttaaaacaacctccccaacaccccccaaaatcgaaagacacatacaagaaaaccatctcaatctaactataaatatcactatccgtattacaagaaaataaactgggcagtagtggagcatgcctttagtcccagcacttgggaggcagagtcaggtggatctctgtgagtttgaggccagcctgatctatagagtgagctccaggacatgctgcaaagctacacagagaaacccagtcttgaaaaaaacgaagaagacaaagaagaagaagaagaagaagaagaagaagaagaagaagaagagaaggaggagaagaagaaaataaatataaaatataaaatattaggccaaataaaaacataaaatgataaaagataaatggtaactgtttgtctgttttgtttttcaagacagagtttctctgtgtagccttggcctcctgagtactgaaattaaaggcatgtgtcaccattacccagctagataaatggtatctcattaatagccgtgtgtgtgtgtgtgtgtgtgtgtgtgtgtgtgtgtgtgtgtgtgtgtgtgtgtgtgcgccctctggtgataagtgtatatgtatgcagatggtagccagcagtcaccttcagaattcattccttaggagatatccatgttgctttttgaaactgagtcttttacagggatctggaaatctggccaacaagctctagggattctgtcatttctgtcttcccaaactggaattataagcacacatttggcttctctatgtaggtgttaggggtcaaatttgggttcatgtgcttgcacagcaagcattttacgagctaagccatcccctaagccctggtcttccacatttctctctctctccctccctctttctctctctctctctctctctctctgtctttgttgttgttttttctgagatagggtttctctgggtatctctggctgtcctgaaactccctctgcagaccaggctggccttaaactcacagagatccacctctgtgccctaggtgctggactaaaggtgtgtgccgccaccacctggcatctgccacatttctaaatgatcttcatttaatcttaatttttgaacaggacttaagatcagatgaaataacttgttggcaggcctgaatgtaccagttctggcttatcctggcttgttatcataaattcctatagactcaaatccctttttcttttcggtttttttttttttttttaagaaagggtttctctgtgtagccttgtcctagaaatagctctatagagcaggctggcctcaaactcaacaattccctttttctaaaaaaaaaaaaaaaaaaaaaaaaaagcctggcagtggtggggcacacctttagtcctagcagaggcagaggcagaggcagacggatctctgtgagttcaagaccagcctagtctagaagagctagttccaagacagcctccaaagtcacagagaaaccctgtcctgaaaaacaaacaaacaaaaaatttaacccgcctttattctcagcactcaagaaacagaagcaggcagatctgtgagttcaatgacagctgagtctccacagcaaattcttgggcagcaaaaggataacactgtgagacctgtctcaaaaacaaaacaaacaacaacaaaagtcaaacttgtcttatttgacttttctgcttcctagaagctcccatgcacaccagggagccaacaatgaagggcagtaacaggagaaaacaaaaaggcagggctgggcaatagctctgcaggtcacccatggaaatgcagtgtcttgaatgtataatcacagcaagatgggaggcagagaagagtcacctgtaagatggtgggccagctagcctggagtacacttatgcagcagcaaaaacagagagacccacctcccaagatggaaggcgaggatcagccctcaaaagctgtccaaataaataaatacaaagttttgaaaagcaaaaagtacaacagctgctgggggttggtggcacatgcctttaatcccagcactcaggaggcaggcggatctctgtgagtttgaggccagcctggtctccagagcgagtgccaggataagctccaaagccacacagagaaaccctgtatcaaaaaaccaaaaaaaaaaaaaaaaaaagggggggctggagagatggctcagaggttaagagcaccaactgctcttccaagggtcctgagttcaattcccagcaaccatatggtggctcacaaccatccattatgagatctggtgccctcttctggtgtgcagatatacatggaagcagaatgttgtatacataataaataaaatcttaaacaaaaaagtacaacagctatcttatattcagctttcatctttatttttagttcagggggtttgtgagtacaaaggtatcccaggatccctgtagggctggaattacaggccgttgtgaactgcccaacatgagtgctgggaaccaaaccctcgtcctctgaaagagtagtatgtgttcttaatggctaagccatccttccaccttgctttctgctttcagtgctacagttatgggaagaataggtctttaactttggaactgaaacttctctttgtcatcagttgttaccccagaattttttaaagggggcagcaattttgtggggcaggggaggcagaataaaaactggtcccaaaattgtgcttatgtaacactctaccagccatgataaaaagaacactggttgtcccaaatgaaatggagcccagctgaagacgtttagctgaggcactttctctggtaagaaagcttgcagttatatatatataacactggaaagtcccatgcctatctcacggtcaggcataggaggagagaaccgacttccctaagttgtcctttgacatccgaatgctcttcatggcacctgtgtgtccatataaaataaacattttttttttttttagtatggaggtggtggcgcacgcctttaatcccagcactcaggaggcagagacaggcagatctccgtgagttcaaggccaatctgatttcctgagagtgttccaggacagccaaggctacacagaagaattctatcttgaaactccctcccccaaaaaaaattttttttaagattttattatgtatacaacattctgcttccatgtatatctgcacaccagaagagggcaccagatctcaaaacggatggttgtgagccaccatgtggtttctgggaattgaactcaggacctctggaagagcagtcggtgctcttaacctctgagccatctttccagcccccccaaaaaatttttaagtgcaaaaaaaaaaaaaattatctctcctaaccttgggccaccactgtgttactaatcttaaagataatatcatggtatttctcatgttatctcaagactctatcagctgtgatagagtcttaaaaacaagtagaaacaaatagaaagccatacagccagatagtgatgctgcatgactttaatcccagcactcaggaagcagaggctggcagatctccctgagttcaaggccagcctggtctacagagctagttgtaggacagccaaggctacacaaagaaacactgccttgaagggaaaaaacaaaggaaataaagaaaaggagaaaaaaaaaagttcgtgaagccaaagatagctgtgaatgtaaccgaagttaaaattataatctgacaccctttctgcactttaattcctaggctacataaacacccacccagcctaccctacccaaatacacattgcttattttaaagatacagaataaaatatgagctcctcagcctggaatataagaccttcacaaaccaggtcctgacaaattctatgactaagccctttgccagtccataaaatctataagcaagcttgggtaccattcttcattgatgtgtcttggatatacttttactctcaaaggttcacgtcctggaagcctggctcccagtgtggtgatgttgagatgagaaacagttaaggtggacctagtgaatgataattaggggatagggctctttcctcatgaataaattagtattactgtctcttggattgggggcgttgcttgactttttaaaaaatttatttatttattatgaatataataccctgcctccatgtatgcctgcacgccagaagaggtcaccagatctcattataggtggttgtgagccaccatgtggttgctgggaattgaactcaggacctctggaagagcaggcagtgctcttaacctctgatccatctctcgagctcttggcttcttcttctttttctttttgtttaatgcatgtcactaacctggtgactgaccgtgccagaaagtccacagccagtgaataaggtcagcagttattcttcaaggactctagcacactaaggcaacaaccaatacctgagtgtgactctagccttggaggctgtcttttttattattattattgtatgtttgttattgttgtttgagacatggtctttattactagctcaggctggcctttgaagatgctcctatacttttcaaacaaagagattacaaatgcgtgtgccgccaaggcttacaatgctatacttctttgtgttggatgggtcttgtgtgattgggtcagagagtgggataacataagcaatgccactccatgttcctggtcccctctgtatgcagatagttttcttttcacctcaccatagtgtaatatgtccagagtccctggccaggatgctaacatatgctctctgaaaccccagccactacagtcatgagcaaaatcaaccaattcatagtttccccattcaagatatttggctggaacagaacaacactgactaaagcatttgctttattctcctgtctggaaatacctttctccccaattgcctggtaaactactactcaaatcatcccaagcattacctcccagctgggcaaagtagtacatgcccatagtcccagctccttgggaagttgaagcaggagaattacttgagcccaactacaacataataagaccatctttaaaaacaaaacaaaacaaaaaaactaaacaagggctggagaggtggctcagcagtcaggagtgcttccctggaaagcaagaggactggggttcagatccccccagaatccacgtgaattcatgtaaatggcttgcaattccagcctcacaaggtagagacgggagatgcccccagagcaatcagctggtgacactagccatatcgcacactgtgggtttgattgagagacactgccaaaaataatgtggttgagagtgatggagtatgatcccaaataacaacctcaaatcaccacacacatatacaggagaataagacagaaattaataaaaaagatcactattggtcctgaactctttgctcatatctttattatagtttccatagccctttgctcatctcaacatttttttaaagatgtatttaatttgtgtgtgtatatgcgtaatcctgtatgtgcaccatgtgaatgcaggcgcttgaggattctagaagagggagtcagattaaggaggaagcggagttacaggcagatgtgagctacactacctggatactgagaactaaccccaggtcctctgcaagaagcacaaatgcttttaactactgaaccctctctccagcctccagtgttacagtactgaccacactttattataagaggttatacttataggtcctgacaaatggtactctcttgtcagagaatcatatttctcactgtggtgaaacatgaggcattcaaatgtttgttagattttacacaatgaattgattccgaattcggtgagaatcgctgaagtccctgagagatttgataaagggcattgcctttgacaaaacactgttgactggaattcaccagtgaaattcctcacatatgtcagtgtcagggaaagctgtgtttcttctcagctacctattttttttttttttttgttccctaaaagccttgtgagtttcatatgaccttaactgctacgcagttcatccctagcagccacatagaactatctgataagcatttctgggtcctattcttgatttcccttcaatccagtttcctcagtcaattatttgttccttgtgttgggtctcagaagttaacccaagctttttgtttgctgttggtttgtttttttttttaaagattttatttattaggcatacaacatcctccttccatgtatatctgcacaccagaaaagggcaccagatctcaaaacagatggttgggagccaccatgtggttgctgggaattgaactcaggacccctggaagagcggctggtgatcttaacttctgagccatctctccagcccagtttgttttgttttttgagacagggtttctttgtctaacagtcctgggtgtctggtcactctgcagaccaggctagcctcaaactcacagagatccacctgccttcccaagctttttgtagaacaaatatgacagaaaaccagggtaaaggatataaataataatcccaccaaccaccggttttcatttcctgtgatctggttttcatatcctttgtatttttgttcatcactaaaacttgggtaagacaagaaaagaaaaatggaaggcaaaaaattttaaggaagttcttgttttcagggttttgcatgtgttaacatgcatcatccttagaatgagggacctacgacgtttgcacaatgtccctggagtgattggtttctaaattgtgggactttgtcgtctttcctcacctcactccggtctcagccttgtgaaatatggttcatgccttcataatctgttcccatcttttcatggtccccgtgtccttagttctctgcactgaatgcagagatgatacagccctcctcattgaagctgctgctctgccattgcatacctactgctgcatcaattcttgtggccaccacatttactctgctgattcataaatagtctgctggctaagcctggttagtgcgcacttgtaataccagcactcagcgctatatagcaagaccatagctcaaaataaaataaataaatgtcaatatcccactttcatctaaacttccaggtttaatctaaagcaggttttcctgtcctattcttttcagttgattttgaacctctatagcaggtctttacagagatggaagaccatatggagccggagccggagccataaaggaaatgggctgagagataacggggtcagagagatggtcgaactgcagatataaatcagagaaatgaagtcagagatgtaatctagggacaagattggggtgatggcgtcaacaagatatgaaggatgtgggtggggtcaaagaagaagggcctacaatgaatcagaaaccgaagccaggggtcaaagtgtctgtagggcttaggggaaggaaaagatccatttaggggaaaagagttggggaagaggtctggagtcgagcaagggcataaagatggagaaaaccaagatgatctggtgggagagggtgtatcagctcatcagagcagatgatctctctggcttgggccttcattttcttgctggttcttgagctacggagagaagctgtcatcagccagcccctctcatccccaacactttccacctctctataccaggatgctttaggtaaggagaggggttatcactgatgctctggtatccaagattcatctctcaaacctgggtctcagatgaagttctggcaagggacagaaggtatttttcacctgctgtgggattcacctgcaatcgggagccactagcctttcattatccctggatgtctagagagaatccctttacctgctgggaatggtgggtctgggaatcacagaaggggagtctgggctgtctgtagctgatgggaatcacaggaatgggctgaaccaggataaggaggccaaactgggggtttgccaggagctacaagaacatcattcccaattaagtcatatggttctctgtcaagaatcattatctagtgctggctacatggctcatcagttaagagaattgactgttcttccagagcacccacatcgcagctaacaatttaactccagttccaatgagaatctgatgccctcttctggcttccatgggcactgcacacacatggaacacagacatacccacaggcaaaactctcatgcatataaaataaaaataataaatctcgaaaaaaaatttgatcatttagtgctagtgagatggctcagagggtaaaagatgcctgccaccaagcctgaaagtctcacgggacccacatgtagaaagaaagaaagaaagaacgggcttccaaaagttgtcctctgacttctgcaatccatggtacatgtgcttgcctcctccctgcgccccccactattagtaataataatagatacggcctgccaggccgtggtggcgcaccccttaatcccagcactcaggaagcagaggcaagaggatctctctgagtttgaggccagcctgttctacagagcaagtttcaggacagccagggctacacagagaaactctgtctcaaaaaaccacaacaaaatagagcctgttaggtggtatagtgggtaaaggaacttgccaccaaacctgatgacttgagtttgatccctgggacccacaagatggaaggagaaaattgattccctcaagttgtcctctgaccttcacacctgcactggaactaatgcgcccctccccaatgggcatacaaaagatatagataaatggtgtgataatttttggttttaaagtgtcattattaatcccagcactcaggaggcagaggcaggcggatctctgtgacttcgaggccagcctggtctccagagcgagtgctaggataggctccaaagctacacagagaaaccctgtctcgaaaaaccaaaaaaaaaaaagagtcattattgagagtggaatgattataaaggagccaggcttgctcagtgagaagaggaaggcacagaaaagtctacctcagctgtaaacactctttcttggggcctgggctttcccttaatggaggctggtagggatggggccctctgatgaaggagaaaaggggaaggaggtgtctggggacacaggggcggggctaagagcaggaaatgagctgggaaccaccatcaccctcccttcactgcaggcaccacaaccagagaaggggacaaagaggaaatgacagattggggtggggtggagtgggggggcagaatcatgcccctttttgtaagtcactcagtgtgctgacaacaaactaggcagtgtagtcaagatagctcaatttcaaatcaaattaagacatggttcggaatgcttgctaggcagagtggtgagccaggggttgtccttgggcttgctggtttccaagccgactgcaaagtaagccagggaaggagctgaggaagctccaggcagtgcccacacctctttttattgcagcttctactcccaacttcaaaccagggcttaagccatctccttcacctttcctgtgttccccacattggcagcttctccccctgccttctaccacaaacctgtttcttctttgcaagtgatctaaggaagaggggactccttccctcacccccttcctgtggcccagcaaaggtgcagaagggccaggtccttgtcctttggtgctgttctccagcaaggatgcctccctcctctctccccagactatatcctcagacacactgggcccattcccacctgtgcctccattttttattctacaccacgatcccttcaactgctcttctgacacaggacctccattcccaccctctgtccctgtcttgattccctcacctgattcatccgcctctctagactttccaaatgtcaccatcctctcccccttggagttcccatcctcaccctctcagtgacctgtcccctgactattacagaagccagcctctcggccttcatcgagccacatttcctgtcttgtctgtgcacaggttttcacggatgctgaccctgggccactggtccctagaagctgattctgcccaacagaccaaatcaagcaggagaagacaagcttggtgattgcctggcagtccacccacccgcccgcccagctggcccctgctcctgttggcctgcttaccgtcctggcctgagtgctgtagatgctcctgtaagtcacacccaaacactcgttccttggagtagcccttcttctttcctttctgccgagacttcatggccagagccccaggaatctggccctaccacctcggtcccccaagacctttgacctaccagtcccccatggaatcccagtcagtagttaggtttggcccagccccagaggggcagggctccaaactggaggtggaaggtggcctgggcaacggacagtagcacttgcctctggagcccccagggccacacggaagtggatatataagaggaagctaccagaaccctggcattaagctgtgtctcgtggccaggctgagcactagcccttctcgccctgtgcagctctaggggggccggaagctgtgcagctcctcaaacccgcttcctgttagagcatctttgcaaccacagggcctcgggtgggggaggtagctgacattcacaccctcatcattgctgggactccatccattggtcacaaagggaggtgatgtcagaacccttgggtggagtaatggtgcctggggtgggagtaggtggctggcatttctagagaccaaaattcttgggtgggacagagaaccgaggcttgccggtgagcaaagcaggaaaggaccgtgcagagtatactccggatgcaggatgcctccgatggctcggtcatctttgtcaagccacgtcacttcaccgagccttagttgccatacctttgaaaatgaggacacagacctgaggcttgagtttcagtttctttgtctgtaaaaaggtacatggctgtccacctcacacagctgctggaagtttccagtacagtcaaatttgaaacactttgcaaactaaggcactggcttcccctaaaggaggtcgtgttcagcctctcctacccgagggcactcggaaatggctaaaggtattaatcagacagaaaaggttttatctgtttatttaaaaacagaatatcatttttatgtacaaatatacatatatttacatgaaatatacacactaggaccccagatcctcagggtccacaagtcctgggttggttgggaatgggatgagagcctctcctttagaccagattgcaggccacacaaggtttactaaatctcagtattcaggctgagtaggtttgggcaggctaaagaaaaacaaacatctaaccccaggccccacacatagaaagtgccagaagagcccccaaattaatgatttggaaaaccctggggaaaggagctgttgtcaccctcgcccacagcagctttctctcctcacctgaatgcccactgtccctcgctaccctctgccctctacacaactgaacctgggcccttgacaccaagtcccaactccgcacaggcacaaagaactgcacacacaactaggggcaggtttgtgagccatgggagccaagcaccccatctctattctcctctcccagtgtttatacctcacaccactggttccagactcctccagctgtcagctttctctgcagagcctcttccagtgaaggtgccctagcagaacttcccagaatcatgggaattaggccctgctgtggggtctgctaaacagttttgctgaatacctatgtgggctggcctcgcttacacaagcccagtaaaaaatgcacgcgtgtaaatcaaaaagggttttgtttgtttgcttgctaagtttctttttctcgaattaggggagactgagcagaactcaggaggctccctaggaggctaatgtacagaaggtatgtatgtccatgcagcaggtaggcccataggccaccagaggacagagggcttctgtaacagttcaagcctctggcagacccctgggcatctgcttcacacttgctccccaaagggtgggaacacagctcccccactttggaggtcagattctagctccagctgtgcccgcacacctggatctggcccacagtctccacgtctcacttccaacctttgcgtcactaatactgctctggggtctgaggaaaatacctgcatctgcaggtagaggtcacacatgaggcacactactcacaggccacacccaagcactgttctgcacacagccacaaatcctgtggcacatacaccattcacgtgggctcttaacatgacggcacaatgcacaccgtatgccatggatagtcacccctccatgcacacacaaagtgccatgaatgcacacacacacacacacacacacacagagagagagagagagagagagagagagagagagaatgacctacacacaatggtgggaggcactcaaccagtggagccctcctgatgaacagaaggattggaggtaaaagtggagcagtcagtggggtgggaagtatctgcaggcatactaaggaggggtcccctaagaagagttgaaatcccccatggaagcagaagagatcaggcccggggaggccaaccagggtcagaccaggtgccctcgcccattgatgtagatgccattgcctgtgggtttggccctcagggtcccattctcctgaacaaaatggttcatggcctgtttgatgccttcatcctgatcatcctcttcttctgtccgcccagagcctggagacagtagttcagtctgtgtttcaatctctctcactgtggtcaatgtggagtagctacggccctctggctcttcactctggagaccaagggcagaggataagtcaggagtggagatcaagcaggcagacacagtagggaagggctggggggtgttggggtcagaggtcaggtaaagcatggataatggctatcccagaggcatggcacggggcttggaaatttgggggtggggagggcaagcatgagggcaagcacacatagggatggggagacggagaacaaaggcatagcagaaatgggggcagggatcgcatgtgagccagggacgatgcagggactggtgtaggggctgctgtcacaccacgtctggggccaggagaggggcctgaagagagtcttggggacaccggtggggccggggggcctcaccatcacagagcagctactgttgtccttgagactatcagggtggccctcggctctcagccctacactctcctccggctgcaggggcccagacataggggaggagttagaagaaagctccgcctcctccccttagcctcttcgcctccgtccttcaccagcctcctccctgatcacctttcccccaacccataggtccgtgtgtctctgacacagtcatcttccttccctcattgactcccccaaacccaccctgcaaccagcacgggtggtggattcctagagcagcccccaacccagtgctaaaagggccttgcatggaagagtcccagcagccccaaagcatctatccccggctaatggcccagcctcggctcagctccagctgtgagtaagcagccagacctgggatagggctacgttcctatctacagaggcactcagagccaagcaaacctgtgtgcccacgccccacacatgcacccaaccttagcacacacctggctcctcgggtccgtgtgatgagaatgcagcctccggatggagttctccctggtcaaagtcagctcctcctcactgggaaagacatctccttgtcaggaactgagagcagcgacagcctcctaaggtgagtctagcctggctgagcctgagtaccatggctggagggtacaattgccaaactctgtctgcaaccgagtatgtggttgcagataaccatgtggctagaaagcatgggtgtgccacatagcgcatagtatgcatagtagatgatacctggggaatatgaatttgtgcttctctcaggcgtatgcctggaccacccagctgtggtccaggtcccaggctttcctcactttcccaaagacattgcccaactctggtgagcaagctgtccagttattaagctacccagtctcctttcacttccggcttcattcctctttgttctcagctcagttcccaccccactcagtgcagccaggactcactatttctgggtcatctgctgtgcttttcgtcgatggtatcgggacatgagtatcaccaccaccaccaggaggcagaacaagagcgcagcaatcacacccacgaccaccactgaggccgacactagatccacttgttttcctggatcttgagggtctgcaggagacaggtcagtgtctgagacgtatgcccagatcctttctggatccaccgcagaccccattgctacccaaatgttatcctcacagaacacatccacggctacctactcagcttaagtgcacgctccatcatccccaaagacattctttgccatttctctctccgtcttgcttcccgttgcccacccccagctcaggattcagcatccccatctttgctcccccaaccaccgtgcttaccaagaacttccacggtgacctgagaatccctcgaagaaagttcattgctgacgtggcagacatagacaccactgtgctccggagtcagcgctggaaagcccagagtgtcccctttcactcgaactccactaggcagaggtccatccagcctgaaggacagggaagctgaagggtgctggctggggcaggctaaggctgccaccacccaacgtgcccaggcagctcttcatccccctcccccatgacgtcatccagagcctcgggctgttcccacggtgcccctccctaccctaggcaggtctaggcagaggccctttctccctgccgcccagcctgacccgggcacccccacacacacttggggaagatccacacgcgtgccatcccacaagctcccacaggcatcacgtcatccagcaccaggtagcaggtatacaggctacaaagtccacacaacaggacactccactcctagcggggctcagaggtacctggaaactggggctgcgtgctccaacactatgatattgcatggtggagtaaacaaacctagccccaggtgccaggccacatgtacggttcatatgtccatgtctaagaacatgcttatcatcggctcacatacatggatatcctacccctttgcaattctctggggaggggggaagtcaagaactcttgaaggagctggtggagggaatggctgtttctgagatgctgacaatagttttaaggagtgttggcacagtagcagtcagtagagtcgactgtctttgtctcacacacttttagcactcagaaatacataaaagatggatgtttaatatagtttgaagttatttaaatttcatagtttaaagttagtttaagaaaaaaaaagtcaaaaagatatatctacacatcccctatggtaaccacacaatcccttgaacaagccagtactatttgctgactatgcatatttttacattggtttgaacatgtgccccagctcatctagtgttcagaatatgtggccctagctcctaatgagttcatcctggtcctgaaaaggaaatggtgctagtcccacagtaggcctttctccaggcacaggcccttaccttgtccagttatatgagggagggggctgtccttcactcaggcatttgagtgtagctccttctcggccaacatgccataagttttggtcctcaaggcccctcacagaggcctccgcaaggactggaatgggaggagggaggaggaagatgagaagatgccttaatccatgattctttgaagaccttctggccctactggaacagcctctacctacacccacagctcctggccacattggggggggggcaccccatcagaggtgtgagccagcgagtcccccttggggtaatggagtttcacactctttcttatctcctatgacactagcatagtgctactcacagagcaggtgctcagtaaatgcctaacaacccaccagtttgttcatttcctaacaaacatttgtcgatttcttactttgttttgtttgtttgtttgggttttttgagacagggtttctctgtagctttggagcctgtcctggaactcactctgtagaccaggctggtctcgaactcacagagatcctcctacctctgcctcctgagtgctgggattaaaggcgtgagacaccactacctggcccgatttcctgttttgtgccaaacggtaatgtaatctgagctttgaagtctaaagctgggaacacactatcatttactctgaacccttgtaggatttaaaatctgtgagatgctttgcattcacatatgctaattctcatcgaaattctgtaaagttggtataattacactcatttgctggtgaagaaaatgaagtctaacaagactaattaactattggtaaatagcagagtggggccttgtcccaaggctgtctctaaaccctaaactgtatattttgcaaacttcaattccatatttatattctgtcctcccatcaactctgtaaaaataaggcagtcttttctataaagctcacagagataccaggtagcattggcacacgcctttaatcccagcactcaggaggcagaggcaggtggatctctgtgagttcaaggccagcctggtctccagagtatattccaggattacacagagaaaccctgtttcaaaacaaaacaaaacaaataccaaacaaacaaacaaaagctcacagagaccacagtgattttcccaggatatctaggttggctcccaagtcatctgcttttggattagactgtggactccaagactcagattcaaggtcacagtgtcttagcactattttcagaatgtagggacatcttacccatatatcccaatactcacaggccacttggagggtgtgggtgatcctccggtcctggagcaggccagggtgagacaccacacaggtcagtggctgcccattcatgcttcggctaggcaccaggtgaaactcggaagtgacggctgctgatctggagtgcttgaaggagcggctggactgtgtgcctttgacctctgtgtcccaggtcacactgggagctgggctgccctcagcagtgcaagaggctgccaacgtcaggccctgaccctcttctagtggtggaccaggattcagtgaaggcaggggaggcactgtggggaggggagaggtgtgtgaaagaggagcacaatgcctgtcaggaggcctccctcagtcttacccagctgcaaacttcagttcccttctctctctctctctctctctctctctctctctctctctctctctttattatgtatacaatgttctgtctgcatgtatacctgcaggccagacaagggaaccagatctcattacagatggttgtgggccaccatgtggttgctgggatttgaactcaggacctctggaagaccagctagtgttcttaaccactgagccatctctccagcctgcgcctcccctttccttatcttaccaataaaagtgccagatcaatgctgtaatttcaagtgtctttacatctttttcactcttggaattttttacaatgtgaataggtcatttttttgtttttgttttttgaagcaggctttctctttgtaacagctctggctgccctggaactcactctgtagaccagactgtcctcaaaggcacagagatctggctgagaaccacctgcctttgcctcccaagtgctgagattgaaggcatgtgccaccacagcccagcataagtcattttttaaaaaaataaaaataattttagaactaattggatactatctatgtaataataacaatcataatcactacttactacgtgtcaactattatgctaaatactttgcatacattatctcatttaattctgccaacaaactagtgaggtgggtattattatgcctgttcttcagatgagaaaccaaagctcagggagggtcagtgatttgttccaggtcctcagctcttaagtgacaaagcctagagtcacagattttcttttggggtgtgtgtgctggcctcaaattctccatcctcctgactcagcttctggagcagtgtaagtatagatatgtatcactaagccagcttttttttttacactcagattttgttttgttttttttccctccaagacttatgttactgacttctacccaaagcaaaaccatgaagacttttatttctagcttcaaaaaaggcccaaagcacaaaactgaaaagagaacttgaccatagatccagggtaacctgctcacatggtctcagaatgtggtcttagaccacattcactgaaggcccagtcaagaactgtattaaccccttgctcacagataaccacatcacagctgcaccctccacattttaaaaccatagaacctaggatggtgaaggaagctttgcgttggtgtctttcacagaatcagttaagtgcagcttggaaagggggggtttgttctgttttgttttttgagacaggatttcactgtgtggctttggaggctggcctggaattagctctcatagatcaggctggtctcaaactcacagagatccgcctgcctctgcctcccaagtgctgagattataggcgtgtgccaccacctcctggcccgaaagggggatttaagtagagtctggttaaggttctccactctttaaaaaactgttcagaagaacaagcccatgttccaaaagcacaaaggtgcagagtgaaattcgggccatcagaaggacaagctttctttcctttttaaagattttaaaattttatttatttattatgtatacaacattctgcctccacgtatgcttacaggccagaagagagcaccagatctcattacggatggttgtgagccaccatgtggttgctgggaattgaactcaggacctctggaagagcagccagtgctcttaacctctgagacatctctccagcccccttgtttttgtttttgttttgtttttttttcgagacagggtttctctgtgactttggaggctgtcctggaactagctcttgtataccaggctggtctcgaacccacagagatccattattccccagttcttttttggagagaatttatgaattgagtgggaggtgcgggataatcctccctcgcccctacagggccttatcttttatttattttttaaagatttatttatttattatgtatccctgcaagtcagaagaaggcaccagatctcattatagacggttgtgaggcatcatgtggttgctaggaattgaacctctggaaaaccagctagtgttcttaactactgagctatctctccagccccggtccttatcttttatatctgcctattctgcctctgccctatagttctcttcagtcttatcctgcacccacccacccacccaccacgaatcctgatcatgcccagctggtcctacttacccagaacacggagccgcatccgtgcctggaagctaccggctgggaaggtgctgactctgcactcgtactcgccctcatctgcttgcacagcgttgcgcaggagcacagagccgtccagagggtctcgtgggggcggtggttgctccacgcggtcctcataggcggggctcacatgaagcccgtatttggagtgcagtaaggccagctcccgggtgccttcgtttgggtccacccgagcccatgccacttgccccacctgctcatccggatcccctcggtagaagcagggcaattttgcatcctggcccaacaccacggtcactaagtcggaggtctccagctcacccgccgggcatcgtcctgcagggggcagacagaagcagtcagaatgagggggactgccaggacctagggcacgcaatcaaaatgataatgacagcaaaggcagccggaactcctggagcgtttgtgcttgcaaagcacatccaatccattacctcattagatccacacaccattcccaagaggtaggcgttattatcgccatttaacagaggaggaaactgagatccaaagggaagtggcttgcctaaggccacacagatgatttatggaagactcacccttttgcagcctgggattctatttgagcaaagaaactatatcaggaccagagacgtagctctggccctcaaggagctcacaacctttcaggaaatgggatctctgcacatagaaccaggaaactaaggacaaatttcacaggaggctcaacctgccaagcgggtaaaagtaaaagtgaaccctcttggaaagaatggtgaggagcaactgaaaaggttcagacgtttggtgcctggagtgaggcattttgggagtgtcaggtccatcctgacaggcccttgggaacatttttcacatggcttgaagatgagagacctggattcccagagagaaggaggtattcaatgtgggaggaatggcatgaactgaggtttaggggcaggaaccagcaagtcactgaagacagaaagggcccccaggtcagggccctggagagatgaggtcagggcaggcacacagcaattgtgtcagaatgttgagacagaatcagacgaccagggatgaaggactagtgttttggtaatcgatgagcagctgtacaaagcatttggaaattttgaaatcagataggtccattacataacctcattggcaaataaagatccatttcctgccctcttggaacctgaggactgttttgggggaagaaatagaaatacaaatggtagacatctatctgtctgtctgtctgtctatctatctatttatccatccatctatctgtcatctaactactaacagataggtatggaatcatgcaatgacaattactttttcctctatctctctttcctcctcctcctctttatttttaagacagggtctaactatgcagcctgccgggctggctgcaaactcactgttcttcgtcagccttcagaatgcttggattactggatgcaccaccacacctgacttgcaatggtggtttctgacttagtgtttggtggtttgttgtcggttgtttgaggcatgtgagagtcatagggagggcttgcttcatgtaagagttgggtggaatcaggaggcccaggagacctagaaaggcattgtggatacaagagcaaggtaagcaaacactaggaagtagagaggctggctgctggttcaggaagcaaagagaagaggacccaacctaagggagggtgtgtgtgtgtgtgtgtgtgtgtgttgagcagcagtggaaaatatagctggggtagggtgggtccaaatatcccaggactgccatgccaggaaaaggaattcaaatttggtcaagaggaaatggagtcaccaaagcctctctagctagcaagtggcatgaagcaggtgacaacatgaagtctgaccagaaaacaggtcatggaaagagaccgaggcagagaccatgaggctgtagccatatccctggcaaggtggtactgggcagataaaaggggacatttggtgaggatttggtcactgactggagataggtgatgatcaggaaagactcaaagatgactggatgtttgcaacgagtaacttataaaggaggttggacctgggaatgcttatggttatgaaaaaataaacaatacccagggccaagggctgggccaaggcaggagagcactctgggatggcaagaactccaactcagaacatccaactgtttctaatccctgcctctaacgtaccccacacaccctgttgtctgtcacctttgctcacactatacccctgcctggaatgccctcctccctgtgtctggttgctcctactcatcactgtctggagcactcctactcatgccttaggactctgcttaggcatcatttcctcctgagtcctccctcccttcccccacctcaagcagcttctttgggtgccctgcccttgcttccctagctctctgctttaaccctttagcctatatatcaggctttcagttttctcgctctccttctccaaggcattgagctccataagagtcaaacgagggtcatgtatcacatagcaaaaacatggtttctgattctatactcagtcagtggtatgtggcctccttcctgtcacataattggaccttgatgaatgtttattcactgacatgaatgaatgaatgaatgaatgaatgaatgaatgaaaccaggcatggtagcccacacctcctagttccaacacttgggaaggctcaagcaagaagatttggggttcaaggtcatcctgggcaagagggagacaatatctcaatcccccacctctcaaaaaacaaaaaaaatatgcaaacgagtgagcagatgcatggaagagacaggcaacaggaagaaagtataatcaagaggaatgtacagtcccttagttggactacgcagggaaagcgttgtcatggcaaccttggagtggggcttcactgtctgggttcactgccaagggaagtatctctggaccaggcgaaggaggaaggggatggagatgggcagactgcagtgaggaaatggagcatggagcagggccgagagggtcccagggaaacaagccagtggtctcgtggccctgacaggaggagcagagggaaggatgctgcttctgggagttgggagggccccaggccgacgggacagacctgcagggccagataccagggcctgacctgcctaagctgacactggtcccacccagcccagcctgggagtccagctaaccacttgcacccctcccaggtacctcctcctagcactaaagggagtaaggttgtcaaagaaggctgggggtggggtgcaatataggcccttcagctcactctgctacaaaacactgatgtagatttaagtcacaataatgtggatgcaggtcacagggaccccaagccctgtcccactaggagacacaatccttccaaaggctatttctgtgacaccgtcacatccgagatttccacccttagattttatttatttttattttatgtgtatgaatgttttgcttgcatatatgtatactatgtgcttggtgcccatgtaggttagaagagggtatcagatgccttagaagaactggcgtttcaggtggctgttaactaccatgtgggtgctgggaattgaacccaggtcctctgcaagaacaagtgctcttaactgccatatctcaagcttatgtatttccatcctcatccctacactggaccccaccctgcctacaaatcacccatattttgtctccccaaatacctccttagggcacagtaagacatgggtacccatcacatacttgagtctccatccacaatgtccctaaccagtgaatccaagatcctcatcctgaaggtacaagccccagttttgcagactgaggaacccaggagaacaggaaagttcctttggaactgtccctacaaaacccacactgtcttacagtcactatttagtggaagtatctcagactgaaaaattcccacttccaatggccttcagttcatcttctaaatcaaaagagatgagttaagagaacttgggcccaagtatccttgtcctgggctaaatggacccaagaacccaggcttccaagccagggcaggccaggattgtctcctcctctcccccacccagtgcctgcctggcgtcagcatgatgatgtcaccagacagaaagagacacaccgcctgcctggtgaggtcaccttatgggcatgtagtagccaggccaggccaagcccacagacccttctactgctgcatattgtttgctgaggctgggggcctctagtttctcgggcactcctcctcctcccaactctccccacccctcctctcaaggagcaccaggacgctggtcaggagccttagtgactcagaagctgccacacagcagcaggcctagccacagccaccaccaccttgcgcaagggagagaacaggcccaactggccagacaggatccctgccctcagcctcccccacccctggccaggccccctcaggcctctttggggccctgccctttgtgtaccccgcccgctcccagacgggtcctccattcctggcttgggctagctggctacaccctactctattccttggctccaactttcctttctgtgtaaggctaggcctctgagctcaaaaggggaaactgaggctgacccttgcagatactcagccatagcaacatgtttgagagcaacatcttttctctcgagggacttttctccatcagcatcttctgctggtgcataaaagaatatacacacataggggtactaggggtgtctgtgtgacaaagtcaataactcctgagtcttttgtgtctgaatgtctggtatctttggatgagggctaggccactttttctagttcgtctgcatatgaagctattttcttgcaagaacttcatacacatatgtgctcacatctctgttcagggaaatacacaccctaacttttctatacccagaggggagaactatgtgttagcatgtgaacatatatgcatgcaccattacacacgcatctcaccctctgaacgcacagtccacattcggtcctggggaactccacacacatagtaaatattttgatatcgtttatcttggcttccatttgtttggctcagccgcctttggtcagcgtgtagctctgggcttctgcccattctaatgttgcccctggcatccctccccatctcaccccaagacttcagggcagattcatctcaggcacacggtggaggtaaccagagatgaggtcaccattcctccaggtgatgggaaattgccaccaagcctccctgacaaacaaaacaaaggttccctctctcttgctctttgggttcctacaaagagactcccaccctttttaccccctatggccacacccctgggccccccagtacttctggcccctcaagcagagattcttccctgggaatcactgtcaggactttgctgcttgccaccaccagaaaaaccagctctggctctaggcctggggtaagagctgtctggtgcaggtttggtgggaagcagctggggggggggctgcctgaggctagggggaggggtccaagctgtctagggtctcattcttttttgttaactcttgcctcccttccccagcctcaccagagagggttggcatgagtgtgttagtctgaggcaagaaaaggcatgagagggaagcatctagactccccatccacccaggacaggtgacaaacaaagcaaagccattttggtccttccctgcccataaccttggccttagaattgaggaactttggaaaccaaaaactttccctccgccttcacccacctccctccctcaccccccacttttcctaagccccccagcttaacgagagcttcccaagctgggcaaagcgcccacccacagattaagggggggggagcacacaagtaacagagggaaagaacaatggggaggacggtccatgaggcagccgactctgccttagacacagctctcagcacagataagtcccctaaaccccccggagccagagtctgagccctgctgagtcaccactgtgggtgggagacctagaattcaacttctctcaaactcccgagacctagcctccccccaaattctgcctaccccctccgccactgtggctagctctgcctcattccaatcacagcctcaaccttagccttcagaacagttgtagagagacatgctgggggtgggggtggcgtagaaagccatgggaacagctcctcagaccacaggcaccatgttagtgcctgttccagtgaaagaatggagtatggtaccccattcccctccagaaagcaggtggggtgagtccccatttaaaacttcgttgctttagattctgtgccctgacctagaccccaaagttcctctactctctctctctctgtgctcctgactcagtttcccacttttcacttcatcccctctttgcctcatctttttgatcagtgtaagtgttggagagcagattatgtaggattctctccttacagggcttgttcccctctggctggtgcccattcgctttgccagaggacccccggattctgaggttattatgctctagaagatggcactgtgtaccctagactcctcactgccgtctctgtagttgggatctctctaacccagcctgtgcaccaccacaaaacactagaatggaaccagggtcattgaggccaagggcttccctgggattctcctagttctctacatttgggcggggaagcaaacctccctttctggcttctctgggttggggtaggtcctacaggaaagggcctgcccacctctgtcatcatgagtagaaaagcagagatggggcccctccctttctaggaaattcatctcaacagaaagtttattctaaccttcagaagacagagtttagaacttatagaacagcttactcccaggccctgcaggatcccaggagttagagactgggatcctattggaaagcagtttgcagattcaggcccctcagccccagggcaaaagatgggggagggaggagggatgggacctcacccggaaactcatcccattaaggagaaacaaagagctgtggtgttggaggcgcctcccaagcccgggctcctctccctgtcaggggtggggcggggccctagggctcagtgctctaatggccctggagttggggggcaggtgtcactttgcagttgggccaggaaggctgtgtccttgggtcctttcagccagccacagggagactgatcaattcttccaacaccacaaacacccacttcaagctgggcaatcaatcacagaggcctactatttcagagttcagaaggtctgcagagaccatccagtccttctcggtctcctcaagtagtctctcagctgttcaaaatacctaacaaattaatggaagaaatgggatcagaactcaaggctcctgatttcccaatctgaggggtgtttggagacaaaaattggtctaggttcctagggccattagggagatgcctacacatacacaaaggagaaccagaaccaggagtggaggggatgaggctgtctagttcttgagctgtgatgccgtagtccaagtttccaggaatccctgggaatagcctttgtctctgtgcagttcatggcagcagaagtacagtgacatccaatcagttactagcttcctgggcaatcctgcagccagcctttctccttggcatagcttctctcagacctctgggaagtctggggtaattttctagccaggagttctttccctcttttctgggcttctattagaaagaacagtttggcatcatggaaagggaaggcggggatagtatccttaccattgacttgccaacttctagtgccataagcactcaactatgcagtttttttcttttttcaacaaagtcaggtgaccaagacagtaaccctggttctgctttttacactgaataatcttacagatctcacctgcctatctgtttctctcagttttcccatctgtaaaatgaaagagttcaagtagtgatctctttgatcctacccaagtcctgagacagcatgactccattcttcaggtgtgggtagattctacaggaaaagtgtctgttgggttccctggccaagcaggaggccccaccctctcggcttaaacaagtgaaaagggctttctggaagatgggaattaagagcaggggttgggggtagggggtggtggtggtggcagaggttaacgtttagaatcctgagattagagagtggactgctgatccttctgttataagaccagagtgaggacaaccttgaatactgccagtccccacatttatgtctagtttgcctcttgctcttcagctgagattgggggtggggagagagagtcacccagtgctgctggacaattgacagtcccttgctactgtttcttgggctgaggatcctactgtcctctgcagacagggccttgtctttctaaggaaaaagttctcagttactcattctccaataacagccaatggcattctaccgtggtctcgttgtgtgcgtattctctctctctcttgccctgaaaatgatacattccaatgatttatatgtgttctgaacatattaggcaggcagaaagtataagtgttgtataggcatccaacagagaaaaaggagaggtaataaatgaataaaagtgggtcatttcccatctagaaggccctttaccttctagcctccccctaatcctgtaagaaacacacaccattattctccacctattagtgtgtgtaccagggaaggaaagggactagagtgacaagagtttcttggctttcctgtaatccctcaaggagctcgtcaatcctgctgctcagaaaattatcatgagagaagaaggagacagaaatgcccacccactctccaggcaccagatgtctggcaccctgtgaacactgaggcagttctgaagcccagttggtaggccacaaggccttctggaagccctgggatgaacagggtccttggttcttcctttcagtccacctgcactgtatgcatgcgtgcgtgtgtgtgtgtgtgtgtgtgtgtgtgtgtgtgtgtgtgtgtgtgtgtgtgtgtgaagcaagactttagcagaggtagttagggactgcagacaccaggggcttgtccttggggcagagaggggacttgaaaagaaagagctacattgagtcttctgagggcactgatggcaagtggaaagaccaggagaaagagatggtctccttcatccagagtccaaggaaagggaatttttgtgtatgtgatgagtccgtgtgtgaatttgtgtgcgtgcgtgcgtgcgtgcgtgcaagtgtgtgtgtgtgtgtgtgtgtgtgtgtgtgtgtgtatttgcgtgcctgtctctgccaggtagggttcagaagcaagagtactgatggttcaggcaagtcctacctgtaagcgatgccaggaacagcagcagcagccaggcttcagggccccacatctcggctcccagggacaggggcattggctgaaaggcagatctgcccagtgactctgaagttccacggagttctccctgggagccggttctggagctgagtaaagctttgacccagaaggcaggaagtcacggagtccccaggccctgacgtacctgcctgtcccacttgggtctccacttaggggacccaggccccagttctacccacccagccgtggctacccccaagaagccgtgatcgggagccctgagctcccccagagctgcttcccacgccgtggccaacaacgaaggcagaaacctgggaacctgctaagcaggtcagaacaggtgcgtctccgggggccgggcctggcacagagaggagactccgcagccaccgcccccacggcctgggctaactaatgggcgccagggagggagggaagaagggaagaatctgggtgcgggcagtgggatctcatccgcaataggggctttacctgtgagggtatgaacggtgctatgacacggaaccactggtagggggtggtacaaggaggcctgggtgtcttagagagggaagcaagccccagatgtgtgtgaaaaggaacgaacccctctcatatgacagccaggtcagctgtttcctggggtccttgacaagttcctcaaactcctaaagggctcagctttggtgccacggaattagaggagaactgaagaggtccctacctcatccttcagaaggcctaaatcagcgagagacttgctagatgatatagtcaagttagcctagtggttttctggaagcagaaagctaattcagaaaccccctgagaaagaacttcacagatttctcctggtccatccctgcacgggagaggtcgagggactggcagggagttggccctgtggattcctggttttcctctcagagcgccctctccacaacttgacacctggccaggagttttaaaagtgcattagtacagcctgaggaggggctttccttctctatggtgtgtccccccacccatggtcatggggagggtgatgagcttgaagtttgcaaggactgatttcactctgtccctgcatcctataacacttgtactcctctgatcacatagttccagtttgggtggataacagtaaccaccgagggacagctggggagccagaagaaggggtacacaccaagaacctgaaagacagaggcagactgcagtttcaaaggcaggtaaaagccagacatgctggtgcatatctgtgaaggtgagccctgaggaggtgaaggcaagagcatcaagatttctcttttcttttcttttttcttttttcttttctttcttttttttttttttttttttttttttttttttttttttttttttttggtttttcaagacagggtttctccgtggctttggagtctatcctggaactagctcttgtagaccaggctggtctcaaactcacagagatccgcctgcctctgcctccccagtgctgggattaaaggtgtgcgccaccaacacccagctgagcatcaagatttctaagacagttttggctacatagagttctgagttatcctgggctatttgaggatctacctcaaacagcaacaacaacaataatttttaaaaggcacatacatgtggagatacacctggggaaagaaaatatagaggatacatagatctcatgtccagaaacacagaaaggaagaatgaagcatcagtcatgggggaagttattaatgaggactgtttccatcactattccaccaactctacctgttcagggtttttgtttgttgtttgttttttaggtggaggcctagagccaatgccatgtgcatctaagctctgttccacggagccatttcctcagaccccttacctgtcaatcttgctcatctctgaaacggacctcaaaggctacatctcccaagaagccttctaagctcctcccacttgaaatgaacctttcttctcttcttcctctgttcttgccagtctctttattatagcttgtgcactcataatttgtgcacatcttatctccttaactaaattgtaagctttgattcaagagccattgattgaggcctgttccatgactgagactcagtagacttgttaaactgagggaaaggatagcagctctcctctgtgaagtacttggaagtcggccttgttttataattttgtccagtcaaccatgctaggacagttcacaacccctaatgggaactgagtgtactttttttttttttttttttttggaagtcctgcatttctgaattaatcagcgtcagtgtggagaatacgggaggaagggtcaggtcagtaggcagaggtctcaaatgatcatgttactatcctgaacctgggctgtaatctggcctctgatgctgcccatagagcagacccctctctggaccccacctctcagcagtgatggtgatagtgacctctccctcaagggctatttcctgcaggtcagaggcagattcatgggtcaggctggttgccaaatctccttaatttctctccacctccgccttggcaaaccccttcccctctttagggctcaggtccccacctatgccaggggaacagccccaccccgatgctgctttgagatccagtgtggcaggggtggggtagggccagggggatgggagggggagcatcctgtgttataattataattatcacactttggatcctatcacatgctttcagaggagctctttccttcccacggattcaaccctctaggtacaggaaatcacaggagaaactgaggcatgagggtgggaaagcagctagatcacaaattcagtgtcccatctgcattggcattttcattcaccatatactcttcccctcaaagtgttaccaggcagaatacctttgagcccctggatggtgggaccctaaatcactcaccccaactttagtcatagggaagcctgaagggaaacagaactcctctgaggtggaattaaggtaaggaacacacccacatctttatggctatggccaggccctagtaaacaaccttaaaatgggggttgcaggtgccactagccagagagaataaggtagcatccacacctgtaagtgaggtagggatttttctttcctcatctaacaaatattcatcttcaagtcttctctatttcctcagtcccttagtcctataatgtctcacgtggaccacattcctgaggaatatgcttcatactcaggccctttctgtcctcttctgggatgaatcccagggaagccgcgtttcaggtcaaaggcgattctaaaataatggttatgaaagcctttcaagaccaatgcctatattccgagctcaatcctttcttcaacattgagtccccattcccctcatgcctcactacctaccctcctcccacctacattctgagttctaagaatggggacaattcaagccacgatagaaggcatccttcgcacatgcccgtgtctgtgtgacatcgctgtgcacagctgcaagtgagcattcactcaacagacacctaatgaaaatcactgtgtcaggctcaagggaggtgacagagacacaggacacctgatccctgccctgaagggcccctcaatcaggagaagacagacagacatatatatctgcaacaaattacatctcaccagcacgcatttcctttttgtgtgtctgcgtgtcactaatatacgagggactgcctctgtccatgtccatgtggatgtcatctacatgtgtccaagcatccacttaaactggtctcagtccccatggaaggctgcacacctaagccaaaccggttggagagggttatgctgaaatttttgtttgtgacaatgggacctggggtgagtcagggagggacaaggctgggtggagtggtgcgggggaaggagagtgagagtgagggtcagattgagtgatcagagggagggagtggaccacagtgggaaggggtggggtggggtgccgggagaacgggcctggggttgaaggaaatgagagagctcttcagtgactgatagcctgtttgtctgcaaggtcagaggacagacgtgagcttgaagagaagccctggcattgggagagaggagggtgaggaataaatcagaacgcaactgggcagaagcttgggtgtggatgagatgctggtgccgtttctgcacggctttgataagctgtcccgcatttgttcattctctggcttcctgcagggtttgcacagaaggccgtgggtgccgactgacacggtggaagactcccgattgctggacttgattctatccccaggacccaggcttcacatccacttctactgttcctccataggatgcctcccacttatgaggagagactccccctgcctccccatacacaacacaggggctccagaagccattcctgcactgaaaaacccccagcttaaaacctcactaggctcaacattggaatggtggcatcttgttttccaagctattccatctaaatgttgatatgtgctgtgctgttcttatctgccagtcatgcagtcttgatacccagctcttgtctaaatgacggccacatttcctggttgcctaacaacatcccttcgagctcagggggctgggcctacttgttcctcaagggttctaaagctggagtaagccacccaggaaaatcgagggttgaacacaaggcatatctgggtcctgtttctcaacagagccggtcgaatgcagagcccctcctctttgctctcactcagcctctataaacacacttccgaaacatcagtgacaagaacaccggttaagagacaaaagccttcattattttacccagtgtttatggatgggatgccgcttttagaaggctgttggaataggccctggctggcacgggatgagaatgggaactctcatggaaattgggcttctgagtggagacaatagcagcagatgtaagggcagggagggggtggggtggggttgtgttcaggaagccagagtcaaggtaagggggaagcctgagaatttagtgagaaaacggattctagtgaggaccttggctgtgttctccctgtccccactatctatcatggaaagagctagtttctgcctggggagcccactgtgtgtggaagcagcccccagaggtgagtctagtctgccttccaggtttaccccgaagtcttcctgaactcgtttctccttcatttccagaagcagaataaaagcaacataaaagggttaggcatcaagaatgtccactgctactgatagctagtaaggtcagcaacatccatctgagagctgtaaggaaagggcatcggaacaaggactggcatctaacctcccttgccagtgtttccctccaggcggctaggcttacactcactacagtctcctctggggaggctgcatgcccggaaagtcctacaggatgctcacacaggtccttatccatcatcatcaaggtcttcagactgtgccaaggggttccacactgtggtatagttctaagatgcagctaaagggaagatgtctagtcagacctgggggagacaggtggtggctccattcagcagagaggaaaaggcagaatcctaaaagaaaaacaagtgaaaacagagacagatgcaagtagcagggaaaaaaaaaaagttactctgagaagaaaaagaaagtaaataactgcttggatctggcatacccaggaggttggggcatttttcagtgaaggggacccttctgcaaactcaaggctgtctcaaaactttttttttttaggctgacacaggccaggaatggtagtacatgcctgtaattgtagcaaaggcacaaggaatgtcctaagttcaaggccaccctgatctacacaatgagtttccagccaaccagagtaacatagcaagaacctctctcaaatgtgtgtatgtgtgtgtgtgggggggtgcagttcccagcaatggagtgcttgtctaggacctagagtccattcctaggtttggctttgggtttttccaagacagagtttctttgtgtagccttggctgtcctaggtttagtggcaggcctctttatttgatgagccatcttgccagctccccaaaaaagaattttaaaagcaaaacagagcggggcgtggtggctatgcctttaatcccagcactctagaggcagacgcaggcggatctctgactttgaggtcagcctggtctacaaatcaagttccaggatggctagggatgtacagggtaaccctgtcctgaaaaacaaaacaagaaacagaaaagcagaagatagacaatcactaaagaatggaaattccgtttattcagtgtgaggattgtgaggggtgggtggttatgatgcgtgcaatggccctcatgtggaggtcagaggacagcttgcagaagtcaactctctccttctgtcacgtggggctggagtatcaaacacagctcatgggcttagctgcgagcagtcacctttccctattgagctatcttaccagctcctagagaaaaaaattcagagatgaaatctgaaagagagaaagccattaagagaaaattctggatgcctactgcccactggtgggatttattaatcactcataatgtttgctctcagttcccatactcagggactggtgatgctctcctgttagccattgctttccacaagtccctccccaataccccttcttcattagtctctaacttgcctaatccccactctcctccatcataaatatacttacaatttatctttctctcagatatttcctttttttttttttttttttggacagggtttctctctgtaaccctggctgtcctgaaactcactctgtggaccagactgtcctgaaactcattctgtagaccagattgtcctggaactcagagacccatctgcctctgtccacggagtgctgggattaaaggtgtgggccaccactgtccggctcctctcagatacattctagctcatgcccaatcaaaggaactctcaaggtctggcctcatgcaatttatttttctggcttgcttgttcatgtcctctttgtctttgagctaagaacacagcttggtgccaggctagcataaagccatggaagtcaagtggccagaatgggctgcaggaaaaatgtagacaggtcagagacaatagaggacaagccagagagaaaggctgacagatgaggcagcctggaggatacaggagggcactgcagaagtcctgggagtgtgacagagactcactggtctgagtgttggctttttgtgtgcactgaacaatcccaaggaccagaaatgacccctgggtcagaaaatgactcaggcccagacttggaggtacatgcctgtaatcctaacagtcaggaggctaaggcaggattgttgtgagtttaaggtctgcctgggggtacttagcaatgtgctgtctcaaaaaagaaaaaacaatggggatgaggcaaggagaagagaaagactgttgtgaagatttaagtcaaagcttagccttagagctgggacagacatctcagactggacagcatagacccctcaagtgcatggtcaggtacaggtcatacaaatgcccacttcctcctgctggtcctccgttttcccgccttctttcctgcttcctccgggatatggagttggtttagaataatcaggagaaatgagaatcctaggcagtgcctctcttgggtctagggttattacagaactggagtgcctgcagctcaagagtgtgtgaggcttaggccacatatccaggcgcgatgcaaaggactcagcattagagtccaagctagaagaaaaagaaacaaagctgggagaaacaagaaaggcccctaggatggggagttactatttctcataaggagaggcagaagacaagaacagcagctcagctaaagacaggcaaaaacaagatcctacaatgaatagcagatcgtttaagtaaaacgatcctatcagctcctcattgaatccaaggagagtgtctgatccatgtccagttgttgggaagtgagccagtgagaagtctcagggagattagcttttagctacagatacaaatagttgggggtgtcttttttttttttttaaagttaggaccttttcatgtagtcttggttagcttagttctgtgtagcctaggttagccattctcctatatcagcttcgcaagcactgcaatcaaaggtgccgtgtagtcaagtgtgtacatctggatgccagaggacaatctcaggtgctatttcttggatgctgtccattcgtattttgagaaagatctctgattggcctggagctcacctaccaggccctagggatctgccatctctgccttgccagcactgggatgccatgcccagttattttcatgggggttctggggatggaactcaggtcctagggtttgcatcactgagccatctctctagcctttgatgttcattttagaagagaattttactgtaaccatggaaaaccaaagatctgacttgtcaaatacaggaaataataattggatgggttaaaacatgaaactaggggctggagagatggctcagagatggcactgactgctcttccagaggtcctgagttcaattcccagcaaccacatggtggctcacaaccatccgttatgagatctggtgccctcttctggtgtgcagatatatatggaagcagaatgttgtatacataataaataaataaaatcttttttaaaaaaggcatgaaactagctgggcagtggtggcacacacctttaatcccaacactcgggagacagaggcaggaggatctctgtgagtttgagaccagcctggtctataagagctagttccaggacaacctccaaagctacacctgtcttgaaaaaccaaaaaaaaaaaaaaaaaaaaaaaaaaaaaaagaaactattgttgaatctcagcttagcatacaggtggggacaggcctggtgggcaggcctgttatcttatctactcaggagtttgaggcatagagtacctgggctacaaaatgagttcaaggccatcctggaaaactaatcaagaccctaactcaaagttttttgtttttgtttttctttttaatgggttggagataacatcgaagtagtggagtgttttcctggcaacatgctaggttccatcctcagtaccacaaatttttaaaaagggagggaggtagaaacaggcaatgggtcctggtagtcatctagtctgactgtgccttcctgtgcctgccctcccaggtagttttctgtcaagatctaattgggatcaggaggggagatgcccagcgtgcgcctgctcccctggatcacatggtcattcccactgaaatcttggaaactctccgtggcctggatttctcaagctagtgggggaggcaagttcatgtttggaaaccaaaagtcaaagtcacagctgtctttcccacttaaagcccagcctgggggacacagatacatttctgctcctccccagctgggctagcagtagaaacctgtatgattcccgtctacggccataccaccctgaacgcgcctgatctcgtctgatctggggagctaagcaagtacttggatgggagaaatctgtgtgattcccttctgcagctgaaaccagtcagtcagccttgatctgggcctcttcattctgcactgggtcctgtggggacagcgtcaatgccttcagtaacacagcttgaataaaaggaagagagcagggaggagcaggggtggctcctcctcgtctcacccccacccacaggatcctatcaggagaaactccctgcccttccttaatcctgaggtccacagtgccttgctttccatgtgttatatgattctaaagagacaagatgaaataattattcttcccaggactcagtagtgaaaaaatcgtccaagatatgcctaagctatatttcctcacccacttcacgcactctaactcatctcctcctcccccaagtctcttttctttccctgtctctctcttcccaccaccaccaccaccaccgccgcctccaccaccatcaccacctttctcgcctgtctcttctctcgaagacttgactctactgccctctaggggccagaaataaaaagactctccacccaatcagtagcttcaaagactaccagttacataaacgggtacgctgaggaagtctacccaaatctctgaccccaaagccacttagtccacatccattccctcaactctgacctgcgacttgtttctttcctaactcatccctagaggaaattccaagttggaaactctgcagcagggggcggggcatgcccccccaacacctgcacctcaaatgtcataatcacaaactaatttgccactattgtgttcttcaaaggaactgtcagctcccagccatttttgagcccaagtcttttaggatatttactggctttcccatatctcgttgccctggcgacagcactgtaagatcgcggtagcgaaccagctctcttgtttccacggtaacgggcgctttgcgactttcagtttgcagcagtccgcattgcagtccccgcagtggttgttgggcgacagcggtagagaatggatatcttgagcaaggacctggtctcgtcttggaggggtagctagcccatgcctgaaggaagtgctgggccccgcgtgaaggggtgtaatctaaagcgacccaactgctctccccccccccccccgctgggcccatggctggggcggaatccctgggtcgagccaggggctcggcctggacttggcgaccagtggcacgggacgcgcttctggctcgtgccttccattcttgcaccgaactgcagggacggttctatctggtagggggtctcctagaaggtggtgcaagagtgcccagcagcgatactgtaatgtttgacccaactaggggccaagctgtacgactgccagtccgggacagtccccttcgcagtcatcacgacgcggcaccggtgggaggacgttggctatgcgtggtgggtggctgggacgggtcacgtcgcttagccacggtggccgctctggacacggagagaggactttgggaggtatggactgcgaaccctggcaactgccctcctgctggcctcagcagtcacacctgcactcgcctctcagaccgagagctgcgagtgtctggcagagagggtggtacccgcactcagcgacgctatggaagcatctacacgttaaagttggaccccagcacccgcacttattggtacagcaacctttgccctaaacgtttgtttgttttctctatactctagaaaacaaaacttaaacaaatttactggtaatttattcccgtcctcccccccagcacctcccatcttggaatctacaatttccaagatgacttaaagctatctgctccaagactgattttctcttccactagggcactctggcaaagcggtaaaacattcgacttgtttcagaaaacccaacttaggcctgaatttctgtgtatcaacagctacgaggaagaaggctaccacacggtctcacgatccggccactgtgctgccctgctgccaactgctggaccccacccgggtcatcagctattgctctttgggggctgcaactcagttgaacccgaagtagcagggcaatggagccatgggaaaattaaggtattcaccatttcagagtaggaagggtgaagttagatgagcaaacccttcagataattccttttccgccccaaaggaggaaccacctcttgcccctcgtttgatggaacagctcgcaaggcttgtgagcagtgggcaggggttgcagcaaggaccccagagcctgcgacatcattcctgttcggtggtgggacctttcgctgtactgtttggtggtgagactctgaccagagctagagacacgatctgcaatgacctctacatctatgatacccgtgagagccaaaataatctttgaaggaagggaggagggaaagacatgagaacctgaaaagtacaaaaacatggagtggtggaagacaaattagttgacaagagttacagaaatgcaggctgggtgtggtgatgcatgcactagaggcagaggcaggaagatttctgagttcagggccagcctggtctacataagtgagttccaggacagccagagctacataggaaccctgtctaaaaacaacaaaagttcaagaaatgcaatagatcagaaagatagctcagaacccaaaccatcaaacaaaatatacagagccagatatggtggctctcacctttaaccttggcccttgggaggcagaaggcaggcagatctatgtgagttcaaagccagcctggaccgggcggtgatggtgcacacctttaatcccagcacccgggaggcagaggcaggtggatctctgtgagtttgagactagcctggtctacaagagctagttccaggacaggctccaaagctatacagggaaaccctgtctcaagaaaaaaaaaaaaaaaaaaaaaaaaaaaaaaaaaaaaagccagcctggtctatatagtgttgtggcaaggatgtattacatttgtttatggtgtacttgttcaacgatgtaaagatgtgttgctttgactgtgtagtgtaaggtacctaggtacctgattggtcaataaaaagctgaatggccaatagctagacaaaggagggataggcagggctggtggcaggcagaataggtatctagagtagaggaaagaggaaagaaaatgacgggagaaagagggagatgcttggggccaaccaggcagctgccagccagacacagagcaagacgtacataatgaaagaaaggcaaaaagccacaaggcaaaatacaagtgaagagaaacatgttaatttaaattataagagctaatgagacaagcataagataaggccaagcattcataactaataagtctccatatctttatttgagagctggctggtggcccaaaagaaagcctggcccaatatagtgagttccaggtcagccagggctacacagagaaaccttgtcttgaaaaaaaaacaaacaaacaaacaaaaaatagagccaggcataatggttcatacctttaatcccagcatttgggaggcagaagcaggcggatctctgggagtttccagcctggtctacatacagtttgagaccagccagggtaacacagtgaggccgtttcaagaaacaaaaagtaaaattgactacatacacagaatatttaaaaaggccaacgtatcaaatgaggagaaaaataccaggcaagcatttggcgtgttgaagaggagaatgaagtaccctctctcaataaccaccctctctcaataaccaccctctactctccccccaacaggcaagtctccacctctgtggctccacttcccctgcacagaccgcacactgaagcgtgtgggccatcgcacttgcctttggaacgaccagctttatctggttgggggttttggtgaggacggcaagacagctagcccacaggtttgcatcctggaactcttcgtctaaagaacgtcagaaaggcacatggccaagcctgtttcggcaaacccacacagcgttctcgtcagagctcctgccccacttcaaatacttattaaattccaatctgagaatcaacattttgtctctgaatcctttttaggagggcacttaataagtagacacctttacttgcaagggaaaggccaaagtataagcatttctgatactgggagccattgacctggcagaaacaaaacctgcaaatcatatattattttttgttttatttgaaacatggactcactatatgtagccttggatggcctgggactcattatgtagaccaggctggcctggaactcagatctgcctcctgttgtattccaagcactaaaattagggcatgggtgccgccatgcccagctgtatgctatcttttgccctcaatgtggccggccctaaatgagagaaagtttcaggctactgctaagcattctgaccaaaacatttaattaacaaaaaaatattacaatagcacaatagcagagaaaataataataataataataataacaacaataaaaagaaattagaagtgggaatcagggttaaaaaaaaaaaaattcagaggctttagttcctaagagaccagcactcctgctgagctggacttcgccccagccccttctgagttttccttggctgctggcttctcatcttcccccataagacgaatgttgtgcttttcccgaaattcattgagttctttcccctttgcctgaagctgctgtgacagtgtctcgatgatcttctgtatctagaaggtaaggaaaagaggttatagaaggattgcacgtctcccttccctgacctggaatggactatgattagaggaagtgaaacaagataataccaatctcacctttagccaagaatcaagaaagcccagactcttatgtgatttctcaaacatagtgtcttatacaagggaatcatctgagctacttatgttatttattcttcgacaatttcataaatgtatataatatattctaaccactgtttcgtccacctctaccgtgagtcccccatctcataatcatatctctgtcttgttttgtgacccactgtgtttaaccaggaccatccttgtgggcatgggtctgctggagctatctacccgaggatgagcaacttaccaggggctgtatcaccgaacacaatgacccccctcccctccagcaacctttaatttcaacagctccccagggagggtgagctgcttatttttaaaatatcattcatcatactatggtttcttctcttaggtcacattttttttttttttaagcactgatttatagctagctggggctggcttcaaacccaagattcccctgactcatcatagcaagttaatcaccaatgtatgccacccagtcagtactctttctccttttaaaatgtcactcatggtatctttaaaggcctggttcagttatccaaagagagcctatgaagttgcattttaaactgattcttgactggaggtgtacctcagtggcagagttcttagacctttcattattcataaggccctggatttgatctgcagcactgttaaaactagttcttcaggtgattttggttcaggtatccatggactacactgtgagaaacactgctctacccaccctcctcccagctcaaccacatcaaagagactatggaaagggcacacagccaacagctcctcatggaaggagttgggactctgtaaacgtataaagtgcacagactaacagactgtagactatcttcaacatgaatttctgcccggactttcctccctcacattccctaaatctctggtcacccccgtttaacctcttggttgcccaaactcctcctggggaatccttgctcacctgctctttgttgccttccaaggcaggcagcacctctttgacagtccgctctaccagcacgccgccaaccatccggtagcacctgcgggtctcatccacttccttcagggtatcaatcactaggctagggtaggagaacaagaccccaaaattcagcaccactctactgcaaccctccctcaaaaaggtccatccaattgttctattgtttctctgactgtcttacctgtgttcattcaattccatctctagctcagcagctttggatgccaagcccctctgttcctgccgaaggcgattaaagccagcaattacctaggagcatgagagagaaaagatgagagatgagacagtgaaaatgccagaatggcaaggtagattttttattccccccatgtattcatttattctatgtttatgagtgttatgcctgcaagtctatatgtacgtgtactgtgtgtgcccataggccagaagagggcatcgggtcccctgaaactggagttacagatggttgtaagccaccacgtgggtgttggaaactgaacctgtgtcctattcaagagccaagttcttttaaccctgagccttcttgccagtttccacccccccagaggtttttatttttaactctatggatatgtgtgtgtttgtgcacacagagaccaagagagggggttggattctgcggcactggagttgcaggcctgatatgggtgctgaaaatcaaacctgggtcctctagaaccctatgtactcaagcaccaaaccatcatcttctcaatctttgccttttgtttagtttttgtttttgagacagggtttctctgtggctttggagactgtcctggaactagctcttgtacaccaggctggtctcattcacagagatctgcctgcctctgcctcctgagtgctgggactaaaggcatgtgccaccaccgcccggcttacagttacaggtagccgtgagcttctgggtgtgggcactgggaactgaactctggaaagaagggacaactctggaaggtccattctctcctccaactgtgagttctagggaccaaactccagtggccagacttatgcagaaagtgctttacccattaagccacttaagtcttttaataatagttcagggctggaggcacaactccgtgaaaggtgccttagcacgcaagaggcactatataaactccagcaccattaccaacaacaaaaagtacctcatacatggtttgctaactatcccccatccaatgtggaactacctctttaacttggctaaacaggtttctgtaggcagccaatcacaaaacccttgcccccttgatcctagaggttagtagtctatgccagctttttccagatatttgagttgtgggtagagacaaaggcagaatgaaagcagttggagctacaatactgtgcttacaaagaggtgaccttccactcctattcctggattccttaaagcggtcccagttcttgaactttagtctaattagccctttgtgctcaattttgcaaactacctgttgctcttcaaaaacactcattaaaacaggtatgggtgctcaacacctgtaatctcagcactcccagacatcctgttaagttctaggctagtcagggctactacagagtgataaagtgtcctgaaaaactagaagaggggaataaaaaaaaggacaaacaagttgtttgtttgtttgttttttaaaaaggagcttagcttagtgcctcaagcccataatctcagtactgaggagactgaggcaggaggatcatgagttcaaagccacctgggatcgaaaccctgtcttttaaaaggaggaggaggtgagaaagccagtggggagaagataagagaggaagggaagatgaggaaagaaagaaatggaaaagtcctccccctgcccccagaaagtaaaagtaatccggggactaaaccagattctaaatgttctcccagcaccaaatggcgccctcttgtggatatatgtggtgccacactcgtagccaacattcttactaatagccacctgtttccttcacacacctatctccaccctttcactgtagcaccggagatcaggcccagggcttggagcatgctaagaaggcatctaccagtaagctatcccagcccctaccctatttctttattccagtataatatgaaccactttctgttgttgtctttcaggatatgaactaaaataaatctactgaaatgtgtgaattatccccagttgtggaaaaattcagctgtaactacagtaaagtaaatgcattgtcagcagctaacttggacataactcgaagagggatgcacaatctgccaatttgaagctgccatctctggggtccccagggaatgagaacagtctagctccattcccatgcctcagaatccccattgttccttctaaaacacaaattttctagtggtcttctgccccatgcctacatctaattcttctcttccttattccctgttggtttttaaatatttatttccatgtgtaagtgctctagctgcatgtgcaagtttaagccagaagagggcatcagatctcactatagacagttgtgagccatgtggttgccaggaattgaacctaagacctctgaagagcggccagcgttctcaaccactgagccatctcttcagctcccataaaatatttaaaaatttctttttagattggctttatgtagtttttgttgttgggttgggtttttttttgggggggaggcagtgttcaagacagcgtttcttggtgtagccttggctgtcctggaacttgctgtgcagaccaggctgaccttgaactcagggatcccagcctcctagtgctgggacaaatgcatgcaccacaaccacccaggatcatcaacacagcccccccaacacaaaatcttttctattttttttttactttttttgtcccatatagcccaagatgacctcaaatttgctatgtgatcctcttgcctccacctctcaagtcctgctaggaatacagagtacccattatattcagtatgagattcaatgccacctattcaacccaaggcctcgtgcatagaaggcaagcgctctaccaactgagctacacatccaaccccaagtcttctctatttatattggtgttatttgtcactatataacctgccttcttcttttatgttaccactcagaaaaatttaaatatgcaaatataacctatctgtagacatgtaaccccttcatgacctacaactgctttccacagtgtggaaagttaagagcacctactgtgtatggtagtctcatttatctctaaaaaatgcaaacagattatggtacagctcagtggtagagcacttgccctttatgtgccagggttcaatttacagcctcgttcgggggacacaactataaaacatgtaccttaatttataaattaagagcccaatgccccgggtacaaggagttggttttcagagtgatctgcagagctggcacttaaatacaggcttccctaaaacaaagaacctttttctattactatgttgtttctggctatgttacatgtcatttcttcttgattggatactggaaaaatcgaatagggagagaattctgactgaatccacctgaaacatacttccccagagactgctcccctgcctgcctcctttccaacctcccttagtttttatgggttctgagacaaagtctctagtggccaggctgtcctactgtgctccataatcaaaggtgaccttgaactcctgagcctcccacctcctcctgggtgctgggattactagttttagtgccctccttataataaaggtagcttaactctcacagaaaaccttcttgatcttaccactctatcccttctcttctaactttgaggaccactccatacttattgtatccaatttaatttcaattaccttctgtcttttgtgtggtactattgtttaccaaactattctccccaagatcttgaatagccttctctgtaactgcataatccaactgtcttttgtcaaggctcaatctgccttcagtcccagcactcagaatgtcaggcagctaccagctccctaatagtacagcaatcgtcaatgtacactgtctgcctgggaaagagcatgaagcatggtctgagcccaacaaacccatagatgtggagctgcccagcattttagaggcccaatccctgccccagggtttccaaatggcacatggagaaaaattgttatagaattgtaagacaatgcctgctctcttggaatcagacttaaggcttgttttacacacacacacacacacacacacacacacccacccacccacccacccacccccacctacctttctggcctacttctctctttgcctgcctctgcattacatgctggaaggagatgagctacttttccctgcacaaacgaccctggaatcttgagttagtactggaacaaattaagactctggggactattggggcagaataatcgtattttgcattgtaagggcacaagttttgggactaaggggtataaagctatgttttagtagggtttgtcctctccaaaacacacattgaactttgactgtcaagtgacagggatttttcttatctttttgagacagaatctcatgtaacccacactcaaatttactttgagtagatgaacttgaactcctaattctcttgcctctacatctctctcaaatacagggactggtctacagagctagttccaggacagccagggctacacaaagaaactatgtcctgaaacaaaataacaaaaacaaacaaaaaaactgtttagattatgtgcatgtttgtgtgtctgtgtgatagcatgtgcactcaagtggagttgccttggaggccagaacagggcgttggattcccttgagccaaggtgatggggaattgtgagacaagcaacatggatgggtgctgggaatcaaacttgggcctctgcaaaagccatctcaaggggcctttaccagcatttatttgtttgtttgtttgttttcttcaaaacaggatttctctgtatagtcttggctgtcctgaaactaaactagctctgcagaccaagctggccttgaactcaagagatcctcctgcctctgcctcccaagtgctaagacaaaatggtgcaccaccatcaccaagcccataaaataattttttttaaaactctcattgttttatttgtctttctgtcatgtttgtttttacaactgtttcactctgtagcccaggcttagcctggaatggacatggtaatccagccggattacaggtatgagccatcacactcggctgtcttgtatttctagggatctttgaccaagttgaagataaggtctgtttcatttaccagtttctctgtgttcagcagagcctaacacaagacagaccctcaataaaagtattagccactatattggaggctacctccaaatttcaatgcattttacttctcttagaacacttattttctgcctcgaagtagaattatgaaaatcccccttttgtcccaatagatatgctctttgatagggcaggttttaaactctttattcggctacctttacctgactgtactgagtgttcaacaattaattaacaccctcccatgtcctacacttcagggctctcccatttggcccactaagctatatccctagcctcaattcttttcatttcaattgtgtggtttttttttccttctactatcgattaaatactagtcccacgattaacaaggcacggttctcataccacaaagggctttctgattagtcagacatatcccgatgtattggggtgggggcaaacttagattagaaaagggtttccggtctcttctaaaaagtcaatctccactccgagaacacagtgagcgagttcgaggccaacctgggctacttagtgagatcatgtctcaaaagaccaaacaatcctggcccggcttagtgacacaggctattaatctcagaattcgagaggcaggagcagggacaagcggatctcttgagttccaggccagcctggtctacactgtgtatttcagaaaagtcaagactgcatagagcgaccccgtcgcaacttccacccccgaccccaaggccaaccaaccatcaaacaaaccaaactaaaccacaaagccaatctactaaagactccttagttaaaatagttacagaaggccgggcgttggtggctcacacctttaatcccagcactcgggaggcagaggcaggcggatctctgtgagttcgaggccagactggtctccagagcgagtgccaggataggctccaaagctacagagaaaccctgtcccgaaaaaccagaaaaaaaatagttacagaagactgaagcggtcgagtctgagtcacgtggttttgcagcgcgtgggcgatggtgagcgcggttttagagtcacagactaaacaattccccgactaataacctctggggttcgttactagatgcaacgccgaagcaggcccgcctcccagtagctcggagacgggggaaacgacgaccccatcaccttggggccctggacaccctcccagctcccgcagctcagggctttcccactgggctcccgctgcagcctgcggacgtggctctcctctgcacacccacctccgcatgccctagcaggggtcgtgatcgcctccctccgcgagtgcgacacggagaacgtggaaagggctgagggccggtacaagccacagaccccgtttcctgcacgaactcgacaccggccgagctgccctcggcgctcgcggatgctcacctgttcggccgacaccgcccccttcccggtgctgctcccgctgctcttgctcacacgaccgctgctgtccgccatcttcgccacctgcgagctttccggcctgcgcactcccactgcgtcacatccggtctggtagttaccacccacttgcccctgcgcttctggctccaggaagctcctctggtcgaccctgcgaatggttttggcggtggcttcatgtaggacctactccccaaccctgcccgctgcggtgaattccacctacggtgctttaacttgtgcaacagagattcttgccccagggagaggcggggaagggcgcgctaatcagagggcggggtccagggttgggatctggtccggagccccctgcccacctcgagatggtggcgatctagggagagtgaacttgcctttcgagatactgctgtaaggggagagatacgcgttgagcctataaagctgtgcaggtggcacagccgagaagagagaattggggaagcgaggaaggttccatgagatgacttgaaccgcggaaacgtttggcagaggaaaggggcttcagttttaatgtgagatcactggaagttgaggtattgaggctcggatcagtctcctctcccatgtttcccttttacgacctctttccacagctaatcgtgtggggggatgtttttgaagccttgggggaggggattactggccaggcctggaaatgacagagaattctagaaacatactacttgaaggaaggttaggtgtcctgatttttcaccctcttcaggctgggcttcatcaccaggcctcctcgccaactcctgtcccttttgtgtaccggaaacagattgcctcgaatctcggtactttgtactcagcccaggtaacatattttcttgttctctgcctggcacattgccgctcaatccgtgtttataactgcagtgtggggagacaaagttgtctgccacccaccaaacatttaataagtgaacaccagtagctctggggttattatgctctgaaagaatggaaagaagtcactagggatggtgggacacacctgtaatctcagcacttgggaagcaggcagcagtttaaggtcatcctcagctacataacaagacctggctgggctacaaaacaccctgtctcaaaaaagaaaaacatctaggtctgtggccccatcccacttgagcctctgggtttctccgtgctagcaaatctgagaacactgcccgtgctattcacaggcccagagctatggaggtgtcctcctcaacttcctgggagctgcccctggtggctgtgtgccaggtaacatcaacaccaaacaagcaagagaactttaaaacatgtgctgagctggttctagaggcggccagactgggtgcttgcctggcttttctgcctgaggcatttgacttcattgcacgaaatcctgccgagacattacagctgtctgaaccactggatggggaccttctgggacgatatagccagcttgccaggtacaagggtgggagggaagtagaatcattaccgggtattgttcctggattgccacataaagggggtagcgccttgagtagagttgtcagtgtcccttctcccccagggaatgtggaatctggctgtccttgggtggtttccatgagcgtggccaagactgggagcagactcagaaaatctacaattgtcatgtgcttctgaacaacaagggtgagacttaataacattttagcttgtctctttccaggcttttctaccttcaactcagatccttcagcattattttctcaactatttggctttagtgggttttgtacttctgatcttagcgtataaattaactctttgggagaactaagctgggcttctagagtgtctgttctgagtattttctctgtatctcttactctaggactagtagtggccacttacaggaagacacatctatgcgatgtagagatcccaggtcaggggcctatgcgggaaagcaactctaccatgcctggaaccattcttgagccaccaatcagcacaccagcagggaaggtgggagttaaaaaggaaataggaatacattgaaaacgtaccatcccccttgggagttgaaagatgaaggtacttgatgttatgatgaatggggcagggaaggtgagtgggttgtttttcatttcaggttggtctagcaatctgttatgacatgcggttccctgaactttctctgaaattggctcaagctggggcagaaatactgacttatccttcagcctttggatccgttacaggtcctgcccactgggaggtaagagaatgcttcttcaaaacataatgactccttttaatcttactcttagtagagtggtgggtgccacaaagctaaactccaagtactctagaggtttgccacaggctcaaggccatcatgttctacatagtggtaccttgactcaaaacaaaacaacaaaaacaaaacaaaacaaaacaaaaatagaagccaggcagtggtggcacacacctggtagcagaggcaggcagatctctaggttccaggccagccagggttacacagtgagaccttacctcaaaaacacaacaaaacccaaaaaaccaagccttgctctcctcctctgttctttctactcgaaaggttttttctttccttcccatcctcagataggtgtgagtcacgttgactagcagaatggtcggggcagattggcctgtagagccagcccgcttttttgtgttaattgctatatgtaattgaatgaacacttcatattctcaggtgttgctgcgggcccgtgccattgaatctcagtgctacgtgatagcagcagcacagtgtggacgccaccacgagacaagaacaagttacgggcacagcatggtggtggacccctggggtacagtggtggccagctgctctgagggaccaggcctctgccttgccagaattgatctcaactttctacaacagatacgacaacacctgcctgtgttccagcatcgcagacctgacctgtatggcaatctgggtcaaccactgtcttaagccttttaacttatgctgggggttgagacatacacacagacacaaacacacacagacacacgcacagctgtgaggtgatgctactgtgacttgtaggcaggacccaagcacagttccctccacttgcagaaccttaaactctcttaatggaacacaggttcaagttcatgggaaagaaataactttgacctgacctcagatttcagtttcagaaaagtaaaattttatatagtcagtgtttttatttcatgaaaactgaagttatgctgagggctgagcagcactggcattgaaaaaaatataataatcataatgtctgtctgggcatctcctttggggaactggaaggggaggtggtatggtacctgctcaaataggctctacttataggcctcctggctcaaacatacctccctgcctaagaaagtgcaacaacgctcagtgcatgtcctagccccattctccagaggaagagttgatactgaatacctcactttctctcaaaccagaaggaagcaagggcaaaggggcttggggtaggttaggagttttgttattttcactagaaatagaagggacacatcccactcccccttccttcctcttttcagggaaattgtactttagccagcagcttctcctccatccagcctgtgcactggtgtccacacatacaccacaattgggaggagttctgaggctggcccaatggtctgtgttgggaggacctgacagggggagccacaccaggcagctgtttcaagctgtggaatgaaggaaaggcagagaggagtagcaccagaggccaggagagagtggagagggccacagcttctttgtttttaaaaaattctataatttggaagaaggtggtaattaatttccaaaatacacttcagagtcccaccttccacatagctcgctcctttactcacagccctttggtttttcagacaaaatttaagagccctcataaagccataggtattgattacccctcaatgcacctgaaagcaatgttcagtcccttacaaaggctatgttccatagactccgtccctatacacttgtcttacggctcagtggtaaggtggctgtagagacacacatttaggggataagtggcaacaggaaacagaggggaagcccaggcacatgggtgcagggaggggtagggaacaccacttccactttcctttgtcttttcctttaaaaaaaaaaaaaaaaaaaaaaaaaaggcggtgtgattggttgaagggtaaagaacaaaccccagaacagtatgtaagctccagaggtgatggagcaaacaatccccagagaggtgagaagggggaaaggtcagggcaatgcttgcagcatcaagttcctcaggagtttctgtcggcccagctcatagtcctcctcatccacattcaccagcagcttgatggcttcatgacccacagcttgcttgagagagtctgtgatgaagacacctttcaatgcctctaataatgagccattgatgtagtcgcgccagaatgcgtcgaggtaggtgagctcagagaacttgatgtcacagatgattgagcccaggtcccgggacttgaggatagtgttggcctggttaaagcgctcaaactggcgctcaagtgggtcctgcttattggagaagacattgccttgcagagcagtctcatgctggcagtattccgcccgaactcgaagcctgatgtctgggagagatttaaggagaatggcttacagtaaggattgtgtttacatccaaagctagaaaagcaagcaagaccagcggagtagaaaccctcttctcacagcttctccatccctctccagaactagttcttcactgtgtccctaacgcccgtgtctcaatgctggagcttccctacagtgaatatgctcaggtcactcacaaacagcatcttgcttataacaagtattttattaaaaaggcgcagaagtttattttaattctgtcttgacttggttcatcctcgggtttttttggggggagggggtttcaagacagggtttctctgtaggtttggaggctttcctggaagtagctcttgtagaccaggctggcctcgaactcacagagatccgcctgcctctgcctcctgagtgcttggattaaaggcgagcaccaccaacgcctggcttggttcattaatatcggcattcctttgacttaatagtaactaaaaagaattattatataccattgccaaaaagataatagttctcataaaaactaaacccaacccaacaacagcaatcaaagagtacctcgaactgaacaacacattgttcattatcccaggagttttttgcattttccctcaagtttacatctctagattctttggatttccttaccacatgtctgcttttccttgggatctggtgtcactgacttccggcgttttcgctggctcccaagtgtggttctccctcgggctggccgcttactacacatctgagagcctgaagcggggcagcacaccacaggatagtggggaggcactgaccagaaagtaaatggaaaacacaacaaggttttaaaagcagaacttaaaatacttcccttggaatatgcaagcaaatcaattacacttaatggtaaaagcagtattgatgatgtcatccgagggctgaggggtatagctcagtgatcaaacatctgcctaacattaatgaagacctgggctcagccctaacatgggggaggggtactaagtatggtggcagaatctgtcatcccagcacgtaagagtgaagaaggaagctgcccaagtggtggtgcacacctttgatcccagcactcaggagccacagacaggcagatctctgagtttgaggccagcctggtgtgcagagttccagaaccctgtctcaaaaaccaaaaaagtaaaggaaggaagatgaagttcaagaccagcttgggactacacacagttctagaattcatctgggcttaaaaaaaaaaaaaaaaaattagccaggcagtggtggcacatgcctttaatccaagcactcaggaggcagtgataggtggaactcactctgtgagttcagagaccagcctggtctacaagagctacttccaggacagcctccaaagctacagagaaaccctgtctcaaaaaacaccccccccaaaaaaaaaaattgttgggagacatccaggcagtggtggcacatgcctttaattgtaattaaaagtgacctaaaaggtggtatatgccttgggttcgaggccagcctggtctacaaactgagttccaggacagtcaggactgttacacagagaaactctgtctcagggggaaaaaaaggttgggagagatggctcagtggttaagagctcttgtattcttggagaggacccaggttcagtttccagcacctaaatgctggtttataaccaaccatctgtaactccagtttgagggatcttacaccctcttttgacttctacaggaacaggcatacacatggtatacatatgaatatgcaggcaatcactcatacacgtaaaataaaaagaaaaaactgacctagtagctggagagatggctcaacatgcatgcagacaaaacagtcatacatataaaataaattgattttttaaaaagtgacctaagggctggagagatggctcagaggttaaaagcaccgactgctcttccagaggtcctgagttcaattcccagcaaccacatggtggctcacaaccatccgttatgagatctggtgccctcttctggtgtggagatatatgtggaagcagaatgttgtatacataataaataaataaaatcttaaaaaaaaaaaagtgacctaaaaggaggatctgacgtgaaagtaaacactagacctagacaaagcatacttcatctgatttgtgtacctgttcatgggatgtgttcacatgggtgtcactgcattcggaggccaaaggtgaacactggccatcttccttaattctctccccattactttttagacagggccttgagttcacctatgtgctaaagttggctggctggtgagctccagagatctgcctttttttttttttttgttgattgcccagctttttctatgtagatactgggactctgaactcaggtgttcattgttgaagcaacaagcacgttacagactgagctgtctccccagcctagcctgatttttttaatgggacagatgaagagggactgcatccttgcattgatgttggcccagccaggcatgtgatgggatcaatattgtcttgcttatgaaaatgacaagtaataccatctcacctgttttagagggctggggaggcctcggttctggatcactgagggctctgggggtcacatagcgaattgatgtttcctccagatacttgtctacaaggtcagggcacactgcaggaggagaaggaggcactcaagaaaaatacacatccgccttctcccaaagggtctcactgcttcttctctaggtcctccctagtcaagaccacctcccttttagacccctgtgctactggctcctgtcctcccagaccccgcgagccctcaccagcccgtctcttcttgagagtgacgtagggcagcaggtcatggcgagtgatgatgcgcagcagctgcagcacctggcgaaagttgctctcatcacagcggccctggcgctccagtgccagtaagaagtcacgtccatttcggatgagtccacgctcatgctcatcaataacatcaacaaagaggaaagaaagcacacgaacatctctgtgcgttaggtgggtgcccacgatgtcaaacatccggtggaggctgtagagcccatgttcctgctcacactgctcttccggccacgcctggcttgcccgacgcttcagacccgccatgctaacggctcagggacagagtgctttccagaatctctgctcagcagctgcaatctccagtgtcctgtaaggcaggacaagaaccataagtgagccacacactggtagcaactaatttattctctgtattgtcataacatgctactaacagtacactgcttaatgttcatcaaatatcccaatctgtttactagaagacataaccccatgctggatgtggtggtgcacacctttcatctcaaccaatacccaggaggcagacacaagcagatcacagagttcaggacagtcaaacagtcaaaactacatagagacctactatccaaaaaaaaaaaaacaaaaaaaacaaaaagaaaaagtcaaacaaaaacaatcctaaagctcatcatacccagcagatgacaccctaagtccaaatctcaccggagggatacagttacttcctagcatgagaatgttttgtgcaattttagtgtggcacagttcagaagttcctattgcagcgatgcatgagtgcacacacctgtaattacagcattcaggaggcaaaggcaggaggattgccctaagtttgaagccattctggtctgcacagcaagttgcagtccagccagggatacataggtagactatatctcggacaaaagaagccactgtggtaaagcatgcctaacatcttagcacttgagaggtagaggaggcaagagaatcagaagttcaagccatcctcaggcacagaccaagatcaaagccatcctgcactacaagaaactatctcaaattttgtctttttatttcatgttacccagattgttcctcttgcccccacccccaactctgcttttggttccttgaaaccctgatttgctgggcttagtgacatatgcctgtaaccagtagtgcagaggctgagacacttagatctgattccaggccaacctggtctatttactgaaaccctatcttatagaaacaacaaaaagtacagtaagagagtaacatctgggtgtggcagtgtgcccctttgatcccagaatttaggaagatctctgtgagtttgacaccaacctaatggtctacggacagagttctaggctagccagggctaaacagtacaacactgtttcaaagagaagacaggggagggttgttaatggttaagagcactagctattcttcagaagacctaagttcaatccccagcacccacatggatagccttcacccacttgtaactcgggctgtaaggatctgatgcctttaacctcttaagacacctgcagtcacacacacacaagtaagtaaaaatgaaaattaaccatctttagtggtggtgttcacctttaatcccagtacttggcaagcagaggcaggaggattttggttctaaggcagccaaaattacacagtgagaccctgtctcaaaccaaccaaacaaacatgttaaatcttttctaaaaagcaacaaactcagagatctgcctgcttctgcctcctgagtgctggggttaaaggcaggcacccccatgcctggcctcatttctttcttttttgtttgtttttaagacagggtttctctgtgtaacagtcctggctgtcctggaactcactttgtagaccaggccagcctcaaactcacagagatccacttgtgtgcaccaccaccatttggacccatttcttaaatataggcaaaaccaaaaagtagagaattcaatctttgatacagaaactgcatcagatgaacagttataagtcactagctagaactagtttaaattttgtgtcattacaaactgtagctgtgtgactttaagcatgtcccttaactttaaagtctcagtggcaaaggtgtgtatagtggcacaagccataatcccagcactctgagaggcctcgtgcaacaggaggattgggagtttgagtccactctgggccactggatctcaaaaacagaataataatgaaacgaaactaacccttcctcacagatggcatgtaacaaaccttccaaggaccaatcacagccctgtgtttgagtcacaaactcaccctggataatatcatcaaccaatcatctagttttaacagttcacctccgctttatagttatttataattagtctttcaagacagtactattgagtactgttctaccctgaccacgacctctaatcacgcggttctttgttttgttttgctttccaagacagggtttttctgtgctttggaggctgtcctggaacttactctgtagatcaggctggcctcaaactcagagatcctcctgcctctgcctcccaagtgctgggattaaaggcatgcgccaccaacgctcagctcatgaagtcagttcttaattcccactgtacaatgcaaagtatttcttaaatgtgccctttctttcactgctactgccagtgccatggttcagattccaatcatcatctcaactgtactactgcaactgactctatttgcattacatttatttgtttgtgtgtgtgttctcgactgcacacgaacgcatgcacgagcatatggccacagtgcacctttcgggggccagttctctctttccaccaagtaggtccccttaagatggaagtcaagctgtcaggcttggtaacacatgccttaacctacttagccatttcaccagcccctgaaactgactctttcaagaagtctctgttctccaaatcttttttccttctttcttttttttggacacaaggcctcaaggtgtagcccagactatcttgaacttgctatgtaatgtagataggcaacgaactttcaataatcctacctgagccttccaaatgctaggattacaggctaccaccatcaatacttgggggaagtggaggattttgagacaaggcctctctctgtatccctggctgtagaccagactgacctccaacttggaatctacctgcctctgccttctgagtactgggattaaaagtatgtgccgccacacctaacctgctaccatccatctttggaggtttgttttttatttttttaaaagatttatttatttataatgtacacagtgttcagcaccaaatctcattatagatggttgtgagccatcatgtggttgctgggaattgaactcaggaccttggaagagcaggtagtgctcttaaccactgagccatctctccagccctgtttgttttgttttttgagacaggatttttctgtgtaacagccctggatgtcctggcactcactctgtagataaggctggcctcgaactcacagagtgctgggattaaaggagtgagctaccaccacctggttccatcactcatctttatatcctaatatctagtagcagacatctgtagaagcagcctgttgttgagaactgaacttagtttctaagaggtcaacaacacaagcaatagcagttgagaaacaaacttacaagtccaagcgtgagagaagaccccactaaaaagacacaagtaaaccaggcatggcggtgcaggtgcctgcttataatcctagaattagggaggctgagacagataacaaatccaaggccagtctgagttaaacagtgaaacctgtcttggaatggggtgggtggggagtgtgcacactagcacatccagtagtcagtaaccaagcacatattctagctagccagagcagtctccataccataaaaacctacccgcaccaaacaaccctactcaacaagatggtgttttgaccattttccacatgaggatacaggctaagctacaagacagatgatgagaaagtgtggatataactcagtgatagactgatgctcagccctcacgaggccctgggtcccatttctagcaccaaaaagatgagagtggtaaactacttcagaagaaccatggtggatggttgagttgaaaagcaatagaacctggtccttccacactgagccaacaagaaaagtgcaaggagactccttcccttaaaaaaaaaaaataaaaaaataaaataaataaaataaaatcccaggactccagaggtaggcaggacagcctggtctagtctacaaagcaagttcctggacaattagtcagggctacaacgagaaactccatctcaaaaaacaaaagataaacacataaattttaaaaagagaaaggagaaatacaagtaaaaaggaaatataaaccatatgtagttttgagaggtatcccatccacagtctgggaagcagctgagaaattactcaactacagactgctttccttgtctcttccacttgtttcagctgctgtcactgggcacaaatggggctgctgaggaaaaatagtgcctactcaagtaggcagcagcgggagaaaagcgagcttcctcagagcccctgcaacctttccctggtccctatcccacctgttcccttggccagctgctgactataaggatcccagaggaaacagatgggcaggcttcacgtccaaccaatcaaaacagcaggttgttccttgggtccctaattcaaggtgtcctgaaaccccaagcaattaagaaaaaccacccccacatactttgtccctggaaaatgaggcaaaacaaaggaaaacactttagccctaattatataatcaatgtaattctacaacaggcctcaatcctctgagattaactcccttcacttgagaggaggggaaaagaatcacttttaagtcccagatcatctcaggtactagggattaggaatcaccagaacatctaggtcaacagctcccaaccaggagcaatttgccccctcggggaacatttgacaatgactgggacagctgtggttgtcaagcttggtgaagacttcacaagcagcatataataaagctaaggtacacatcctataaatcactaacaacaaaaatttacctggaccaatgtttatagtactaaagtagtgaaattctatcagtgaaacatgatggtcaaaatgatgcagtcactttccttattagatctagagaaggaagctattatgtctcgtcaatcccaaacaatccaatcatattctagaagaaaaggaagggcaggcagacatagctcatttaactcataaatccaactagcacaatggagcttcatctcactccagcaatgcctcctctgtcacctgctgtcgccattcaggttaatagcaggtgctagtgacatactcccttctggtccattccaggaggtctactttgacctagttcaatgtggaattgtgttggaataagaaaatgtcatcctcttcaagactaacacaaatgatcctgatctttagtctcagcgccatttataaagtcctgaaacaagactaaatagcagacccttccttgttaggtaactaatcagacttatactattcaaggaagcaaaacactgaagcaagcatttcccaaggcatgtcttccagagtaatatcaagaggctggcatgcaggctggtaggcagctctccccacttaatcatcatctaggattgtaagttaactcagcatcccagccagggtatctaagaatcaaacttcaggatgaaaagaatgtcaccaacttcctcttaattcaacagctttcagtgacaagggagctcagcctagacacagagctcctagatggaagacaccacagtgactagaacaccttccttcaaacagaagattagaaagaacttttgtgggggctggagagatggctcagcggttaagagcactggctgctcttccagaggtcctaagttcaattcccagcaaccacatggtggctcacaaccatctgtaatgagatctggtgtcctctttcagcctgcaggcatacatgcagacagaacactgtatacataataaataactaaatctttaaaaaagaaaaagaaaaaaaaaaaaagaaagaattcttgtattggtatttcagatacagttccaagggacagaaagcaacaggcagccaagcaccatggcacacctttaatcccagcacctgggaggcagaggcagtggatctccaagtacaaagccacctggtctgcacagtgagactctctataaaagcaaacaaaccacagctatcaacaagtgtactgatccactgaatgatcttgctatatttcagacactaacatgcactttttttttgtaccaggaatcaaacctaggggccttgagccttacagtaggtaagtgctctaccactgagttacatccctagcacagaataattctacatttggatgaaagcgctgaatttcctaaagttctagtttgttttcctttaggtagggaggtctgacattaccaagagccagtaagagtctatatgtccctagacagtttctttctaatagattattctctattgggtccccatgcccaagcagtctagactctcccatctagaaatgacaactctaactttttaaagtactttaaagactatgtagaagaaatatcttggaatgaaatggtagatttcttcctaacaggaataacatctgtattttcataagagaaaaagaaatatttgactctcagaagcccttagaagaaagtcatgtggaagaacttaaaaaaaaaagaaaaagaaaaagaaaaagaaaaagaaaaaaaaagcagtgacaataggtgtggtggcacacctttttgacccccacacttgggagacagaggtagatggagtctgaggctgaagccagcctggtctacatagcaaattatgagccagccaggactacatagtgagaacctgccgagaaaaaaagaatggcttgccagggggtggtggcgcacgactttaatcccagcactcagaaggcagaggcaggtggatctctgtgagtttgaggccagcctggtctacaaatggagttccaggacagccagagctgttacacagagaaaccctgtctacacacaggggaaaaatggcttgaaccttgaaactacaacactacaagagtaagttcttgaagtgctttcctgctggtgggactgggaaaacataaccaaatatatctggaaggcagaattacacagtatgttttcaaaaaatcctaagaactctgaacagctgggagagacagtaaactagaagaaaagccttcccactaaagtacctcagccaccctccaagagaaatactttgtagacaatgtacaagagcacagctttccatatgttaaacatgtttcactcagagatgaccagaaggctagacaacggcaaaccaaagctgggaccttgtctcaagacacttagataggagaagggaaaaacagaaactatctccagttacctgaggatggactgcaacaaaccttaatgaactcagatgagtaaaactcattttccctagcatctacctaattaagtaggctcaaccccaatgcttttcataccatttccattcccttccattgtttgaaaataataaaaagttccagacttaccttttcaagaaatttaatttcccaggtctcttcctagcacaagtttcaaagccagcagaaaaacaaaaacaaaaacaaataaggggggaaagagtaaaatttcaagctttattttgaaacttccaaggtccacagttagttaatgtccgtggcacacacaaaaaaagtcatttcactgaacaaactactccaagctaaagaactcaaacataacaaaggccccaaggtcccctctctgattgtcaattcacaatataatatcaaacccaagaacgtccagtctcaatggctcatagcaagaaaagtgccaactcaacaacctctgggaaaaaccattaccttgaaactgtctcacttttctccccaattccttattccatctattttcttacagcatgagtgctaaggggggacttggaagggaaaaagttacagcccaagaaagcacttccttcgcatcacttcactcatcagaccagaatcaatttccaccttcaccttttcctttagcacacaatgagaacaaaataaccactaaggcagcatccactcatgcctacgcttcaggaagaaacatgtttctaaatatgcatactgacccctccttccctcctagaacttgaagagcaaaggaagggtctgtaaaagaaagcatatttaattagcctgattacctaaatgccagcctgtctctttatatccttctcaggcttccagagcctccaccttggtaatataggctccagccatgtctgtctccccatcttgtatggctaattgcaaaaaaaaaaaaaaaaaaaaaaaaaaaaaaaaaaaacctagaaaagtgctttactcatctccctatttgtaaccaggaaaaacaaggaagcagtaagcaagcgagtgttttggaaagcaaatccggctgaaccctcattcaaccccaattctccaaacccgcaagaccattcctttctgcccttcccaccctattaaaagctaagcgcctggcaattaaaattggctgcaactgatactgcctaactctgctgcctttccacaagggaaagggaaacccccaaacctctatcatccgtgcagctccacagccctatctccctttcctcccaaactttcctccgggtctctcactttctacctcacctcgctcgacacagctacactcgccccattcccaaaccctcctcctctcctttcccaccccaattccccccaaggcccttccgcttccacttccaattttaacactttgaaagcctccctccacaagacgtcttaagtccaattctccccctctcccacgtcctcacaacagcgctcccgggagtccagtgctcccggccaccgcatgccacgagcccccttccccttcacaccctcagcctctccctgccgctcctacccctctctaggcgccggatcgcagccccactccccacctcggcctctttaatacccctggcctggcccagcctgggcccttgtttacgcccctccccatgctcgcactcccgcgccgcgacccctgccctctcccacagttgccgtctcccctgcacgcccccctcggctcttcccctcccccacctcgcagcgtcccgtcacctccctctctggaggttctcaggctggacgtcgccaccgcctcccccttcactttccttccccaagcccttcgcggccccgcccggccccgccccgtcccactcgactccccctccccactccggccgccccgccgcctcactctcggctcaggttcggcgccgccatgttggatccatccgcgctgctctccctcccgggcctgtctcccggcgccgcatccgggctccagccgccaccgcctccgccgccgccgccgccgccgcgggcgtgggggaggggagggacgggcgggggtggctgcatcctgaacagcgcctcccggaacctggccggttagtgtcggcttcgagaccataacgaggcatgagcggagtagccatactaggtgagggcagcctggcagcggcattaggccgggtagggatggcttcacgttgggaagagagaatggggagtggcagccatcttgctttggggcaagctggcaacgcagggttttctgaacggcggtttccgggcggttctcacaagtggagggagcaactaacgtgcttgagagtggaagactcggtggcgccagagctggctggtatcggacttcaaggcctattgggagagtggggctggcagccatgacacgtaagggcggaatagtacaggagttggactgcctggtgaacccgggtgaaagttcaagatctggatttaacctttgctttgaacttcctgtcacccggacgttctgaaacccggaccttgcagcgcttctcagagcctccctcggagttcatcccttcggtgttttccttttgagctctcccgtcctgtcgaccgtgcctcacgtagaggggctgttgggaattgaattgtgtgtgggcagtgagctggggtggggtggggtgggggctcacgcgtgtctggagctgccgaccgcctaacgtggctaaagaaaaaggtaatacataaggtctgtgagatagggagggacctgatggcgcaagacattgtaaatttattttatcccaagggcaatgaagaggctttgaagggtcaaagcagaggtgtgagcaattatatttgtattgtagaaagatgactgcttgccggcctgggcatgccagtgccggcctggagcctgagggaggaagattgagctctggagatgtcgaccagttggggcttaatttaagcgaggaaggccacaaggatgttagctcagtggtagaatactgtcttagcacaggtaaacctgatgttcagtcctcacggagtggggctgggtagagagagcaccggttgcctgttaaggatagtttggaaaagtagaagagacaataattatgaagatggccgggcgttggtggcgcacgcctttaatcccagcactcaggaggcagagacaggctgatctctgtgaattcgaggccagcctggtctacaagagcgagtgccaggataggctccaaagctacagagaaaccctgtcacagagatccacctgcctctgcctcccgagtgctgggattaaagacgtggatcaccaccacccggctggttacattattttttaaaaatttatttattatgtatacaacattctgcttccactagaagagggcaccagatttcataatggatggttgtgagccaccatgtggttgctgggaattgaactcaggacctctggaagagcagtcaagtactcttaacccccgagccatctctccagcccctggttacattatttttaattctatgggagataaatgtggaggcaagggagatccttttagacaggtaaatattaaataatgtgggttggaaaccaagaaagtttaaagtgtgcttctgtgcatatggatatttcttggagccataaaagaggataatggcctagaaaggaagaatcatgcgtttgagggatgagatgagggaaggaagcttaaaagaggacaataaggagcaaagaggaagaaaggaagacagggggggaggaaagtaccaagtgagcttgcttaaagtactaagcgtaagaggtcaagtaaggccaggcggtgcgtgcccttaatcccagcactcgggaggcagaggcaggcagatctctgtaagttcaaggccagcctggtctacatagcgagtgccaggataggcgccaaagctacacagagaaaccctgtctccaaaaaccaaaaaaaaaaaagagatcaagtaagatggtgactaaactatgtcatttaaattgtggaagaagaaaggtcactaggtaaatttggacaaggctgttttcatagatatgtggggtgagaaccagactgagataggaagataattatgtacagaaacattgtgtggccaggcaaggtaatcccaccactcaaaaagctgaaggatatgatttgaggcaaagctagacctatgtaacaagtaacagattaaccagatgttgcaggatgttgggtcacacggtgaaccccaagactgcattatgttgcttttccgttggcacagcagctacacctgaatctactactgtttcaggcagtaattgcaactctgcatttattggcctattttctcagtcagtagccctggagggacttttacttcctgcaggatctgcctcctgctgctgccaccaaatgtagttgttaactaaatctctagagttgtatttatcaatagattggaagtcagaggctgaggtaaaacctgctagctcagagaggttgaggagcaactagctgactctttgccagcatctcagaaagagaacatccttccgctctgccaaactcttatgtccctccctactacttaactagttgctgactctgcctcctgacccaaggttggtgttatttaattaatgcaaaagcaaactcagtgggatcaaatatcccacagcatttccccttttgtctagataaaaagagtaaaactaggtacaacaaaaacaattgccaggccaggtagtggtggcacaagccattaatcccagaatgagaggcagaggcagatggatctctaaatctgataccagcttggtctaccgagtgagttccaggacaggcaccaaagctacagagggaccctatcctgaaaaacaaaacaaaacaaaaaaagcaattgtcaggtaagaattacattcataatgtcattccatttgtatttggtacctttggaaaagatactgtactgtctgtcccatcttggtggatccaaagttttttgtttttgttttgttttttttttttttggtttttcaagacagggtttctctgtgtagctttggagcctatcctggcacttgctctggagaccagactggcctcaaactcacagacatcagactgcctctgcctcccaagtgctgggattaaaggcatgtgccaccaacgcccatcagattcaaagttttatacataaactacctttttattataattggtattagcaacctagaacttaaaatattttcttagataaattaagcttttatgtttatcaaccttataaattttacatatcttttgcaagtttcttttctgaatttggtaacaaggaaaactgtaaaactctatatatcagttgggtgttggtggtgcatgcctttaatcttagcactcaagagacaggggcaggtggacctgtgtgagtttgaagccagcctggtctacagagcaagttccaggacaggctccaaagcaatacagagaaaccctatctcgaaaaacaaacaaacaaacaatcaaaaaaatcttcaccccaccaaagatccaagaaggataaaatattacctggataaacaggaagtgcaaagcaaagctatataaaaaaaacaacaaaaaacaaaaaaaaaacttccaaaactatataaatgatatagacagctggctgcctggataatcacccaaggttccactgcaatgttggggcatccatcttgggcctataagcctagaatatctgacaaacttttctgtaaagcaggaattttaaaggactgccctactttgtcttggcaaagtttggcattcactttattttgtgtcctgcttgtccaatttggatagtatactgtcagcatttgaggcaaaggcagtttcttgcacagtggttacctttgcaacattgtatgacaaatgacaaatgaatgtgtagaagttaaaataacagaatataattaagctctggattcatatgatggacatgtgtatcctgtaatgtttttcctaccagagccagttctctctcagcttcacctaataattttcttggactacttcagcccttattggattatggatagagaagatgtgtaggaaggaagagggagggacttggattttgtgcagtctctttgatctgggaagtgtggaaacaaagtcagctagccactcccccaccaattctttgatctatcaggttttcaccttgatatttgactcccaggtttttattgataatagaacaacataggtaaacacttcaccatatcaccttgtaaggtttgaaataaattacttatgtcttgagtagtttgttgtgggatatttgatcacactgggtgaaaggcatcttctgattggtttaataaagagctaaatggccaatagctatgcagatcagaatagacaggacttccttgacaagacgagaataacttgggttgagtctacgcacacaagaaactgaggaaggccaggtgttggtggcgcacacctttaatcccagcactcgggaggcagaggcaggcagatctctctgagttcgaggccagcctggtctccagagtgagtgccaggataggctccaaagctacacagagaaaccctgtctcaaaaaaacaaaaaaaagaaagaaactgaggaaggatgacactgaggaagttggacatatgatacagaggagaggtaaccatgccacactgtagaacgtaggttaataaaagcaggttaatttaagttataagagctagctggagaaagcctaagctaagaccaagtttcataattaataataatcctccatgtcattatttgtgagctagtggcccaaagaagtcctcgtacagtaattattccagttgtgggctgtagccagttatctcccagcaattgaaactcttaagagtttgtaattaatctctcctgatttgtactttctgtggttaaattttctataaacctatcatatatcctaaatagtagaatctcctctttgtattttttttttttcaggagcaatgtgtaatccccagtaaagcaaaattctctttatttcatcaaacattctttctatagtatctgcatctgaatcaaccaagaagatattatccatatactgttagattttatattaggaaaatgtttatgaatttcttttttcttttctttctttcttttttttttttttttttttttttttttttttgagacagtttctctgtgtggagcctgtcctggaacttcctctgtagacaaggctggctttcaactcacagagatttgcccgtctctgcctgccaagtgctgggattaaaggcttgctccaccactgccagggttacaaattatttctaatggctgtagtacaaaatatttacacaagatgaagctgtttaacattccttgtggaagaattttccagtgacaccttttaacaggctgggaattttaataagtaggcactgtgaaggcaaatttttccgtattctgttcctataaaggtatagttataaagcagtctttttgggcctggagagatggctcagcagttcagaatctgggcagaaggagaaactgctcttccagaggtcctgagttcaattcccagcaaccacataatggctcacaaccatctgtaatgagatttggtgccctcttctggcctgcaagggtacatgcagagagaatgctgtatacataataaatttttttaaggttttatttattttattatgtatacaacattctgcttctatgtatatctgcacaccagaagagggcatcagatctcataatggatggttgtgaaccatgtggttgctgggaattgaactcaggacctctggaagagcagttggtgcttttaacctctgagccatctctccagaccaataaataaatcttttaaataaacaacaaaagcaatcttttaaatcaatcactattacaacaagctttcttgtcgaactacctttggactgccaggctgtaaataatgacctggagtcatattaattatgaaacttggccttagcataggctttttcccaactatcttttataacttaacccataaattttaatctacattctgccatgtggctcggttacgtcttctgggtatggcacatctaacttgctctgagtctgcaggtgaaatcacacacctagattccttctcccagtttctctttctgcccagaagtcctgtctatcctctcctgcctcgatattggctatttagctctttattaaactaatcagaagctaccttcagcagacatgtctttacagtataaacaaatattctgcaacacattataatataacatcccttacctaatgaaggcaagggaattctaagctctaaaaagcccattggctgaatcaccttatttatagttctcagatctgttaccagtctccatttttccagagtttttgttaataacaaatatagaattccaaggactgatcgattcttcaatatgttgagtggttagctgctcctttaccagctgccctactccctataatttttctgatgtcaaaggcaattgttcggccaggcattggtggcacacacctttaatcccagcactcgggaggcaggggcaggcggatctctgtgagttccaggccagcctggtctacagagtgaattctaggacaggcacaattgttcctcccacacaagtttgccagttaactatttaaaggtaggtcagttggtgcttttgaaagccccaacagctgttatgcactgcttatttacaactgaatggtctgtgactgttcttgataatacctttaataattttttcagaagaattctttattctatggtttctttctgagattggaggaatgtaattctgtgttttccacaaattctttgctatgttagccacatacagctttaatttcacaatgtacagaaggattattccacagcagatacgtgtatgtgtgtgagagatgtaaaagcaggcatgcacatgccatggtgaatgttggaagtcttctgtcagtccttgccttctaccttatttgagacaaggtttcttttttgttgtttgttttgagacagggtttctctgtgtaacctccctggctatcctggaactcactctctagaccaggttggcctggaactcacaaagattctcttgcctctgcctcctgaatgctgggatcaaaggtgtgcaccaccatttttttttttttttttttttttttttttttggtcattaatcactgctatcaggataggtgggctgtgagcatctgaggattctcctgtctgagcctccatcccctttgcaacatagggatgaggattcacactactacatctggctttgtgtgggttctgaagactcaaactcagtacttgtgtggtaacctctttgtcctctgagccatcttccctgcccttggttatttatttatttatggatgcagggtatattgttatatactattagctgacctggaactcctcatgtaaccaagaatgatgctcctacttcagcctcctgagttattagcctccatgtaccaccatgcacaggtctcttgaatttccttttttgtttgtttttgtttttgtttgtttttcaagacaaggtttctctgtgtagtcctggttggcctggaacttactctgtagaccatgctggtttagaactcacagaaacccacctgcctctgcctcccagagtgctggaatcaaaggcatgcaccactgctactcagctgaatttctttctttttttttttttttttttaagatttatttatttattgtgtatacagcgttctgtctgcaggccagaagagggcaccagatctcactacagatggttgtgagccatcttatggttgctgggaattgaactcaggtccactggaagaccagctagggttcttaaccactgagccatctctccaacctctgaatttcttattttatgataattatcttcataccaaccttttcctcctcaaagattatatctttgtaaaccaaatcctctggcaccccaaaccctttaccagattatagcaggctttttttttggggggggcaccagccacctcccaaaccataccatggagacttattattattagttatgaatgctcagctttttcttatgcttgtcccacttgctcttataatttaatttaacctctttctcttcatctctgttttaccttggggctttatccctttattctgtatgtcctacttttcctgcttcctctatgtctagctggctggtgactgcctggctggccctgggcatccccttcattctctctctctctctctctctctctctctctctctctctctctctcttgctcctcttgtgcctaggtttcttctcctattctgtctgcctgcctgccccaactatccagcaaaaacaaatgtaacatctttatatagtcaaaacaatattccacagtaccagatctcactagctcctgggtaaaagtgaagtcacagtgaaggctaaattgtgccaggcttgcagctgtggtaatgaatggcttcaattcctgaactctagaggctgaggccaaagaatcaaaagtttctaattaggataaactgtctagaatgtcaccattccccaaacctttgatccttgctgctgattagatctggaggtggtaggaaagtttaccaattgactaaggttatgaattatagaggcaagctgttgtggactattattttaactaggcaaagatgtgttacatttgtttctgcttcagaatatttaactgcgtgaaggtgtgttatatttgtttctgcttcatttgtttaattttgtgaagatgtgttgatttgtttctgtagggtatgggggactgattcggtcccccacagtaggggaagctgtagccatgtctgcctagtgcctgaccacgcttgcaagggtgttgtcagggtgacgtagaatgagagttggtcaggtggctggtttctggtttcggtttcactttcagcttgctgtacagactgctgcccaccggctggctctgtcactctctaagtaaggctttttccctattaaaatcccttgtatctctacctggctccgtattggtaatttcccgcaatatgtttccccttgcctgctaaggcacctgattcatctaacaaaaagctgaacagccaacagctaggcaggagagggaaaggcagggctaccaggcagaaagaataaataggaggaggaatctagactcagagaaggagaaaaagaagagaatgaggaagaaagaggagatgcctggggccagccaggcagccaccagcaaacacagagtaagatatacagaaagaaatgtataaagccccaaggcaaaacgtagatgaagagaaatggattaaaataagagctaagataaagttcagcattcaaaacttatattaattataaaactgttggccaatgagtagggtttcttattggctagctctgtcttcgatattagcccatttataaataaataaatctatgtatttccatgcaatcttggcttactggagaatgcccagacctattactcctttgccggctacatagtgttcctttttacaccctctctgcctacctttcccagaattctcatctcctagccccacctattttcctgcctctattggtcaaacagtgttttattcatcaaccaataagagaaacatatacagaaagacatcccccaccaaactggctattgtgtatattattctaaatctctacactataaggagcatttctctgaccatcttcaagaatcttccagtgcacgatgggcggtggtggtgcacacctttaatcccagcacttgggaggcagaggcaggcagatctctgtgagttcgaggccagcctggtctacaagagtgagtgccaggataggctccaaaactacacagagaaaccctgtctcgaaaaaccaaaaagaaaaaaaaaaaaaaaaaaaaaaaaaaaaaaaagaatcttccaatgcaatagggtctagatcaattccttgaagttcataaagacatgtctctctctctctctctctctctctctctctctctctctctctctctctctctctttttaattctattttgccccaatccaatgtttctttccctgatacaacagtcatttctcctatgccttccctgtgatgtctgctaatgggcttaccataaagaagctcaggagcttcccattcaccagctgtactattcagccaaacagtagtcttccatcagtgcattttttaggactgaggtatccaaccggacctgctctgccactttgcttagttgtgttagggtcatttccatgaggatagggactcccagtcccttgtgcactactgtatttccaacacctagagcagagtagagcataaatatctgcttataagtgaattcctgctctgaaaatagataaacctgaggccttcctttaatagtttaggagttaccgtctaataggaattccttaaaacaaggataaactagctgcgtggtgctgcaagcctttaatctcagcacttgggcagcagaggcagacatagatctctctgaattcctggccagcctgctctacagagtgagtgaaaccctgtctcaaaaaagcaaaaacccaaaaagaatcatctaaattcatacacaagagattatctgaaaaaactaaatttgatagtccacttcctgttttaccctgatttgcactccgaagcaatgaataactttgtcctgctaaaatggctctttgtactttttgtactgattaatgatctagattatttgtctagatctagactgatctgaattctagctccaggttagaatctcttacatagatgagccatttccccaggcttattagttgtctccagggacaggcctttgctgtgaacagaatcctgcctgacttctctgagtgtggctttaggaattttttttttcacatgtggggcatgctcattgaaagtttaatctcatatggatcaatgattttatcattttttgtgtgatgcatgtgaatgacacagttgtgaaactgtggagtcagccctgtcgtggaataatctttctgtactctgtgaacacgtgttgttctcatagttaacaataagcttattggccagtagctaggcaggatttctggggcaaagagaatgctgggaagaagaaaggtggagtctgaggagtcacgagagatgcagagagaagcaagatgaatgtgctgtgttgagggaaagtagataagaaatatgggttaaagtgtaagagttagctagtaacaagcctgagctagtgactgagcatttataattaatattaagtctccatgttagttatttgggaactggcaggctggggggaaaaagcctgcctgcacagtccctcacttttatgtgggttctgatggtcaaactcaggcttgtgtggcaagaacttttgtcccccgagccatggcagcagccctgaccctgtgatttttaaatatcagtggatatgtcccaatatggtagtatgttcaatgaatgtttattattaaagtttttttttctgtatatgagtgttgtgactgcatggtatgtatgtgcaccacatgcctgcctggtgttcatgaaggccaggaaaggaagtcatgtcagatcctctgcaattgaaattatggaaagtgagagatggtgagccactgtggggtgctgagaatatcatacattattaaaaagtttagattcatcctcaaaaaaagagaggtagagggtctgaagagatggcttgtggcaagtctttctctgtattggcagctcccaaataacaacacagagacttattaattgtgaaagcttggcttatagctttaggcttgtcccattagttttttgttttaacctttttatctcatctgtgtcccattagttcttgtagcttaaatgaacccatttatattaatctacattttgccttgtggttttttaactctcttccatcttgcacctcctgtttcctctccatgtcatctggtatctttcctacgcctagatacccccccacctctctctctctctctctagaagtcctgcctaacctcttcctgcataactgttggccactcagctctttattgaagcaatcagaaggtgccttggcaaagatacatcttcacggtgtacaaacacgtcagccagtggtggcacatgtctttaatcccagcactcgggaggcagagacaggtggatctctgtgagttcgagaccagcctggtttacacgagctacttccaggacagcctccaaagccacagagaaaccctaactctaaaacaaaacagtgtacaaaaagattattccacaacaatggctcagcagttgctgctcttgcaggggatgggagtttggttcccagcagccacatgagagctcataactataactcgagttccatggaatctgatgtcctttttttgacctctgtgggcatcaggattggatgtggtgcacatacatacatgtaatacactcatacacataaaaaatacttaaagaaatacatttcctaaaagagtttttaaaaaaggtaggggctgtagagatggcttagggcttaagagcacggactatttattcttccagaggtcctgagttcaatccccagcaaccacatagtggctcacaatcatctgtagtgagatttggtgccctcttctggtgtacaagcatacatgcaggcagaacactgtatacgtatctagccagggatgttaggaaacattgttatttctttagagatgcatatcacagaactaaaacaactaaggacaattttaaaacctcatttcaaatctctgttctcctaccccaatcccgtgcctacaccaaaatgaaataaatctttaattactttaggagatctctagtgaagcattgcaaagctgtgtcttagttatatctaatatctttgtaaagagattaatagtgtgctagtaaggtaaaaaccctccaggcttggtcctgtgcctgtaacttcagtacttgggaggtggagacaagggagtcaggaattcaagctacataagagcagtctcaagaaacagagcaacagtgagaatgagggtgtaggtagacgtttctttcccacccaccagttcccaaataaccgacccagagactaaatattaattataaatgttcagcgaatagctcaggtttgttactagctaactcttacattttaaattaatccatacttcttacctatgctctgtcatgtggcttggttccttttctcattatggcacgcccatcttgcttctttctgtgtctgctttctagtccagacaccacccttcccagcatccttctagtctggctctcccgcccagtctcttcctgcccagctataggccagtcagttctttattaaccaataagagtaatacatattcacagtaggattattccatagcaagagggtgagaccgagaacatgctatcaaacaacacaggggtgagagaacaagaacactctaccggccaggcaaactagtgaacgcctttaatcccagcactcggaaggtaggggcaggtggatcttgtgagttcaaggccagcctgatctacagagaattctaggatagccagggcaacatagaccttgtctcaataaaaacaaatactcttccaagtcacacagggaaagcatctcagaaagaaaagtccaacatcatttttttgtagcctaggctgggatgacaccatcaggtctgatttgtttatatggtaatgggggtcaaacccaggtttgtgcaggctaagcaagcactacatcctcagcccttaaaaatacatctgtggccgggcgttggtggcacacacctttaatcccaacacttgggaggcagaggcaggcagatctctgtgagttcaagaccagcctggtctacaatagctagttccaggatagtctccaaagccacagagaaaccctgtctcaaaaaacaaaacaaaaaatacatctgtgtgtttgtttatttaacttagaggattgaagagatggctcagcagttaagagcacttgctgtgcttgcagaggacaggtgtgtagttctcagcacccacatggaagtaatgtctgttactgtaatgtcatttccagggcatctgttgcccttttctggcctccactggcattgcatgtacatagtaccttacatacatgcaagcaaaacactaccataaattacaaataggccaggcatagtggtgcatgcctttaatcccagcacttggcaggcagaggcaggcagatctctgttagttcaaggccagactggtataccaggatggccaggtctgttacacaaaaaaaacactgtctcaagaaaaaaaattaaattttcgttgaaggggcatacatgccacacacagcgcatgtatgtaggtcagaggacaacttgtggagtctattctctccttccatctttatgtgggtttcagggatggaaccaaggtggccagactggtgctacaagcaccttacccacttgagccattttctcgtttgttctacttgttttctttgagacaggatctaactgcttatatagactcaaacttaccaagatcagtatggcctctgcctcccaaatgctgggatcaaagatgtgcacctaccacatatgggtttttgtttttatttgtttgttttggattgagttgcagcaatcttcctgtcatgcatccctcctatacctccacacccccaccccgtactggcataacaggtatggaccactatgccctattgagatttcttagtgtcaaatgaggttagaaattatatgggtaatttctggaagacaggcagctctgtggcttggaggccagcctgatctacataatgagaacttgtctcaaaaaaaaaaaaacaaaaacaaaacaaacccccaaactgctgggcagtggtgatgcacgcctttaatcccagaaccccggagggagagacaggcaagtctctgtgagttcgaggctaacctgctctacaaagcgagttccaggcagctggagctcaacagtgaaaccctgtctcaaaacaaaacaacaacaacaaaacgttagcagaagactcgtcttctatcctctagccatttgagagatttaatccaggatcaaattatgtctgtatagcttgtgcataacacacaaaaaaatatataactctttgcaaaatgttttatcgttcagttggttttaaaacctagacacattaatttttggcataagcaagcatagctcaagctatcctgtttgagtctgtggccagcctgggatacatgagacctgtcccctttaagaacgagcaagaactccgaattcagttgtgttaatgtttcagggcaggcattgtataaactaaggaagtcatcttgaagcaaaaacacgtaaattgtgcattttacgacacaattctttgaagaatgtttagaaaaacctggaattctaacaactttcctggtttgggaaagtcgtgggtttcccaagtttgcttctgagcatgagcggaagtcactctttgagcagcctccggtgatttaatgataggtgccatattccggacagagtaacccatcttcattctgttcttccggacgctcacaccagtgggccaattttattttcttaccaaaaaattaagagtgcattcagagagggctttaaggccacacaacgcctcatcttcccatagtaaagatggcgaagccctgagtaagttgcaagcaactccacttccgcatttttcttgtgccctggtccaagatggcggacgaggccacccggcgggtcgtgtccgagatcccggtgctgaagactaacgccggaccccgggatcgggaattgtgggtgcagcgactaaaggaggaatatcagtcccttatccgggtcagttttactcctgtggttgaccgcgtggctaaggggtagcaggtaatcaggtgtcctcaggaattgcctccgtgcggaagccgcttccggtttttaagtttataaattcatataaattgtgactatttgtgggctgggggattacgcagggagattgcagaacagattctggttaggagcaccgtagggctagaccttaaaggaaaaaaccagcagtgttcctggaaggtgacgtgtctctcccaggccaggtgtttgttctgctgtatgtaagaggagggcttggggggtcaaaagcactcctcagaggccgaaatctcggcccatcactgctcttctctcattcttcgtgatgaaatgaatggaatgaatgaaaggaatgaatgaactcacagaaaggaataagctgaaaacttacggggttagatgtagaaagttagagattgatgcttttagttataaattagccatttcttcagctaatctttctgttgtgggaagagaaagattacactccttatggtggtttccgtctgcttcagagaccagcagatcgccggccttatatattgcttcactgagaagttgactgagtgtttgcttagcatgcaagaagttctgggttctatccctagcccctcataaactatgtggctaatgcattgtcagcactcaggacgtggaggcaggaggattggaagtccaggtcattctggactacataatgaattcaaagaatgtctgaactacttgagaccctgcctcaaacacaataataaagcatatgatagtgttcctactacctagaagggtatggtatacaaagccgaaaaaaagggacccactgaggttgatggaagcagtattatactgtgtttaagtggagagacagacataactaggatattttcagagtatggagagagatgtgcaattcaactttagtttgctagggtaaggcttcttagacgtggtaaaacttgagttgaaacttaaagtataaacacacgggccagagagagatggcacagtctgtaaagtacctgctaccaagcctgacaaccttcattcaatccctggagtccacatagtagaaggagagaactgactgcttcaggtgtcctgttattaccacatgcacaccttggcatgtatacacacacacacacacacacacacacacacacacacacacacaatagtagcatatgaaacataagggtaggaaaaaagatgtttaagacataaggacaggagctggagaaatggcccacttactgcccttgcagagaacctagctagtttggttcccagcatttaaatgctcacaatcattcataattccagtttcaggggatctggtgtgctcttttagtctcctcaggcaccaagtgtacatttctacataaagccactcacacacacaaatattttttaaagttttttttttttcataaaaaaacaaggactgcatgagcaaaggagtgcaaactagaaacagcatggtataagctgggagcctgtaattgcagcagttgggatgccaaggcagaaagactgcaggtttgagacccgtcttggacagttttaatgccttcctggtagttcaaggccagcctgagcaatttagtgagaccctatcaagaaagaccaaaaaagtaagaattaggccggagctaaggctgggtgtcatggtacatacctatgaacctagtaccgggaaggcaaaggcaggagggtttcagtgagtatagtaccagccctggctacagagagaccgtgtaacagacaaacagccaacactaagggcagcaggacatcatgaaatagtagtagggaaaaggaaagggaaggtcaaaggtgaaggctggtctttgacttagtgactgagtgagactgccacctgaaattgagaatgtgttggtggttcacacctgttatcccagcactcaggagagacaggaagatcaaaagttcaaggtcattttagttctctaaggtaggttgtggctggcttggacagggacaggagccctgaagaggaagaggggagggatgtggtacaaaacccagatggatgttctaagtctctgttttctgttagataaaggtataaactgaacccctatggtggtggtggtgcaagtctttagtcccagcactggggaggcagaagcaggtggatctctgtgagttcaaggccagcttggtgtacagagcaagttccaagacagccagcactacacagagaaacccagtcttgaaaagcaaaaaaaaaaaaaggtacaaagtgaaacatgcagttggatactagaatttgaaattctgacaaaagacttgaactaaagataaagatttggggctggagagatggctcagaggttaagagcactggctgctcttccagaggtcctgagttcaattcccagcaaccacatggtggctcacaaccatccgttatgagatctggtaccctcttctggtgtgcagatatacatggaagcagaatgttgtatatataacaaataaataaaatctttaaaaaaaaaagataaagatttgagagttactaacttgtagctgctaatgaaagctagcacagggtcctagtatatctggtaaggtgagttttaggctaaggacagatgctatcaggagtgagaaaataaccctatgagtgtccaaatattttgtggttgctatactgtagggaacctagatattctgttgtctgctctgggcaagcacccagcttgcttgtgttgccttttctttcattttgcttatgtctgaaaagttgtgcaaaacagactaaaaaggaaaacaatcacacttttgaagagggtctacccttgcctccagctcccttttctttttcttctttttttttggacagggtttctctgtgtagctctagctgtcctggaacttgctctgtccagactgacctcgaactcagagttcatcctgtctgagcctcctaagtgcgggcatcaaaggtgtgcgccaccacatctggctccagctcccttttctaagacttcattttctcctttcagtatgtggagaacaacaagaattcagacaatgattggttccgactggagtccaataaggagggaacccggtaagcaggccctcttgagaggtgtgagtaggatcctatctgaacaatttggtatcccataatgaaccaaaagccaccatgcatcagtttagagtgccctaattcctaacctgtgagtcttcagcttggtggcctaaacagagatgccatttgagtatgataggaatggtctgactggactgtggcttggtctttgtttcaggtggtttggaaaatgctggtacatccatgacctcctcaaatatgagtttgacatcgagtttgaagtgagtgtcatgtaatgggatgtatgcaggttagtagaaaggcactgattagatcattgttaacaagctaaacttccttgaagggtctaaacaaaacttttaaaatgggaggggaaagctgaggtttgaggctgatctctaacagtcactaatctctgtgtctagaatccgagctgtacatggcgcttgggggctctgctgaacaagcagatcaaccaggaaatatatatgtttaattagactagttcatttctctctcagttctctgttttattaaggctttgtaatttctccagattcctatcacatatcctactactgctccagaaattgcagtccctgagctggacggaaagacagcaaagatgtacaggtaggattgactaggagatgagaaagagcaaagaaagccttagggaggagctcaagagacagaaggtctccccagagggtgctgctcccgagtctagagggaatctagctttccctatgtcaagcctatgcaaagtgcttagctggccttgttctcagttgtgagcactaattttcctgggttcccaagaggctgctgctatacattatggctagttttgtgtgtcaacgccttcctcttgtccttctcacaggggtggcaaaatatgtctgactgatcatttcaaacctttgtgggccaggaatgtgcccaagtttggactagctcatcttatggccctaggggtaagtttgctactcttggtatatgagaggaagagggagggctcacgacctaagcagtaccagtaccggaagccaggctgagactaagggcggagcagtgttgttcctctaggctgttctcccggagtctctgggaaggaggttcaggtggaacaagaggaattgactacgatagtatcctcacagggtctcccttgtattgcagctgggtccttggctggcagtggaaatccctgatctgattcagaagggtgtgatccagcacaaagaaaaatgcaaccaatgaaggatcaagccaccgaggcaggacagagggccttttgataggctgtattcctgttttcttgcgaatcgttcttcttactcaagagtctttcagagtcacctctgtttgttacaaagtagctatagctggaggggaaaaaaaaattcaaaaacccagcaatagaatacggtcacaaagtttctaagttaagctgtgcagggaggtgaaagacttgggccttgaaataggccatttgtatcccttctccaagtggaaccctggaggcatccggaggcacagggcgttaactgacagctcatagcttttttttttttttggtttctggaaacaaccgtcaataaaagctgcttcctatgtatgtggcctgtggttctcattgttggctgttaacaaggtgaacaagcaaaatattgaggtacataaaacaactgcactaggttgggagggggtaatgaatgtcctttcaagggttaacaaatgggagaaaatctatctccctgttgttgagatttgcttttccctttagcagtgagccatgctttccttactgcctgagcctgcaaaggagctggaagaagagttttacaggttcagggttctattcccactagggatctcccatccctaggtggagtgttaaatgcttctctattggttttcaggctggacgcggacccgcatgcagctttccatgctgcttccctcttgtttggaaagagtctctgttgcaagtccttccgttattccagttttcggctcttcatccctatgaaccacatgacgggatgaaggaccttgaccccagggacttgcggcaatggtttaaagaccaccatccggcaaggccgggaactagtggttctaaagttggctgcgtttccatggtgtcggtcggggagccgtgggggcgggctcacgcaagcgccgaggaggtgggtgggaggattccgagtgtgggcgcgcaggcgccttaggggactgtgaagccggtggccggtggccgggccgcaccaacaaagatggcggtggcccttgcggcgggagcaagctgggctacagctgccgctaaagctgcagcccggcccgcggggaggctgttcggggttaggagggggtggccctgagctggagctggaccccggctggcctcccccgccacctccccggggcacaggtatgggccgggaccttaaggcggggtggggtggggtggggtgggggagctgagggagaacggatgcagaccccggaggacggtcaccacaaagggagaggctcgcggtgcccagcggggcctgggggaagtaggctggaagagcagcattctcggaccgcggggactatgccgccggacactgtagccaatcagcggcctcggcctttctgccctcgaggggggcggacccgggtaaaacctcgccgtggtggtgggagaggtgcagaatttaggggtcaagtagttcgtcctccatcccaaaccattgctccctgagcccacatagcaaatgggggcccagaactggaggagggagtggattgcaaaccacccatttaatcggcttcgtttgcaacccataagggcagggcttgaggttggaatgccgattcctgcatccacggtcccaggtctgaggcatatcacacttgactagccagataggaggatttttaggagtttgtaaattatgaaaacagctgagtctgggactgccagtgcttttcagtaaatctgtagtctatagagagggggtggggcgtgaaaggccaaaatgatgggctactattcagtcattcatttattaaaggaatactaagtattttccttgtgtcaaacattgctaagttctggggatgcgagaactgattttatagacgtgattcatgccctcagtacatgtagaagccagcttgcatggtagcctatgtcttatctcccttactaattcaaatgctgactgaccctctgttcccaggtccagcctgcggtgtccacaatgccccaggcttctgagcaccgcttgggccgaactcgagagccacctgtcaatgtacagccccgagtgggagccaagataccatttcctccccgggcccgcagcaaggagcgccgaaacccagttcctgggccaaactccgtgttacgacctttgcctcccaggccaggtcccccggatgaaaggctcaagaaagtggagctgggtcggggtcggacctcaggctctcgtcctagaggcccccttcgagcagatcatggggtccccttgcctggctcaccacccccaactgtggctctgcctctcccatcccggaccaacttagcccgttccaagtctgtgagcagcggggacttgcgtccaatggggattgccttgggagggcaccgtggcactggcgagctaggggccgcactgagccgcttggcactccgacctgagccacccactttgagacgcagcacttctctccggcgtcttgggggcttccctggcccccctaccctgctcagcatacggaccgagccccctgcttcccatggctcctaccacgtgttacctgcccggccctctgagccattctactctgatgacaagatggtgaggactttccggcacgtgttggtctcccatgctcatgttcctcttgccgccatatgtatggctttcttgttccctgctccgagtccctttgtcaacccctcattgcaccagtggactcttctctccgaggccttctagatattatcttgggttgtatgtgattctccaatttggtgtgccacatttctggtccctagggaattaacctaactatttagaattcttctttgggtccttaggcccgcccttttaaggcaacttctctcctaggactgggcctagacctaattaatccctgggctgaggaggggcggagctagagcacctgctgatatggttacacatttcctcagctaagtgagctaagctgcttgcagttggagccagcaggagagggtgcaagaaggggccacgggggcaggagggggatttgggggcagtaaagtgggggtggggagcagctgggcaaccatgccagtgcttgaggagttgcctcaggagctgcatcgccggctggccggccagcggagtaaatggggaataggtgtgacagccatggctgagtctgtggtacactcagctgtgatgggtttactgctcatgaccaatgaggtaggaagaccagtgagggacagaggctcgagctggggcgtgagcagggggttggggagacatccatcaacatgttattgaaagtgccagtcgaatatgactgtactctgaccttccaggctcgtcacacactgctcctgggctctggtcatgttggcctccgaaatctgggaaatacagtaagagccatcttcctgtcctttctctgtagaaggaatgtgaaatggtgttggggggtggagacaacctgcggatttggggaaggcatgtagaaggagagccctgaggccccctcgaggcttgttgggcaccagccttgaaaggtaatggcagcgtccctactgcttccccagtgtttcctcaacgccgtgctacagtgtttgagcagcactaggcctctccgagacttttgtcttcgaagggacttccggcaagaggtgcctggaggaggccgagcccaggagctcacggaaggtgggcaccaattcctgtcccttcttctgttctcttcccccacccccttccttcaattctgtcccccagtacctatgatccccacccctccaatctgacagttaacagctgtttctccagttcctccattcctagaggctttctatccccggaatctcctcttgcctgctcttctggacattaatccttgtgtcactgtcacaccaacagcctttgcggatgtgattggtgccctctggcaccctgactcctgtgaagctgtgaatcctactcggttccgggctgtcttccagaaatacgtcccctccttctctggatacaggtggggaaactgagaggatagaatttctttctgcccaaatcgggggctggggccaagcagtggctacagcaccatgattctgagccttgacattttctacactgaggaagtagggacccatatttgggcagggaatactgtctgtggactaagaggggatcagttacccatattctgtctggctgtagccagcaggatgcccaagagtttctgaagctactcatggaaaggttacaccttgaaatcaaccgacgaggccgccgggcaccaccaatcctggccagtggcccggttccctctccacctcgccgaggaggggctctgcatgaagaacctgaattgaggtaagggttgctcccccttgctcctctctctcccctgtggttctaccagtagcattcagtcttcaaagaactgagctaactgaaactgaaaatgtagggcctgggggagaccctttaacaaaggagggggaatagtttgaaagtataagaaatgatgaaaggaagggggtgaggctgaaggatgaagatagagggataaaacagtgttaggaatgccactaaactgggaaaggagggaccttttacaatgaaacacaccagtggtgcttgtagaggacggatggcactctcccctcgtgcatattctttttcctctcatcttggatttccccagaaggttcttggaaaaatattactcctttgactagaaatctagggaaggagctggtatgtgggtcgggatcagggccctgtggataatctcaatggttggggtggggctacccagtatcacagctgtctcacggtaccctctcccttcccttgatctgtggtagtgatgacgatcgagccaacttaatgtggaagcgttacctggagcgagaagacagcaagattgtgggtatggaacggggcagagcagtggggattcgggcttgggagaaggaggaaggggaacaaagctggatgatgaggatatgggatggtgtggagagttgggtggcagcaaaggagtgggaagagacaggattctgagagagcacctcaggcatccaacggtgacttttcctcctgcctttttgtttctgtctagacctatttgtgggccagttgaaaagctgcctcaagtgccaggcctgtgggtatcgctccacgaccttcgaggttttttgtgacctgtccctgcccatccccaaggtgggattccagaggattccaggggtggatggaacatgggttttgtgacccacccctacgtgtatgggggaactatgtgggtctctgaagcagaattgaagcctggattatgaaaagataaaagattttaaagggggggattcagaagatgctgacccttacttccccctccccccagaaaggatttgctgggggcaaagtgtctctgcgggattgtttcagccttttcaccaaggaagaagagctggagtcagaaaatgccccagtatgtaggggtttataatggtgggagacttgggggtctgtctgaataaaaggagatgcatgcttccttagcatgggaatagcagttacatgtctgggtgtgtgttagcatctcaggtatgtcgtagtatgcctgggctaaagggggcagggcaaagcaatgagaagcatactaaatttatatgggtattggggtgtcagaaaaaccagccgaggtgagagcacattgacctaagattgtttgctgtttatttaggtgtgtgaccgatgccggcagaaaacacgaagtaccaaaaagctgacagtacaaagattcccccgaatcctcgtgctccatatcctaatcttccagttcttatttctcttaggatatctcccatacattctgtttcctcaccttcactgagttttccttgggaaaaacctgctaccccaactctctttgccatcttccaggacacgttgggggaatggagggtactgaacttcttacctcagctcccttccagaccttcagcctcccaaatgctccttaaccagggctcagatctgaatcgattttccacctcccgaggctccatcaagaaaagttcagtaggtgttgacttcccattgcagcgactgagcctaggggactttgccagtgacaaagccggtgagtccgctgggggaaatgtcctaaggaacctccaggagagggacacaactcttgattgtagcaactgatcttgtctaacccacaggaagccctgtctaccagctgtatgccctctgcaaccactcgggtagtgtccactatggacactacacagccctgtgccggtgccagactggttggcatgtctacaacgactcccggtgagaacagcctcttattcaacccctgccccatcccactgcagctcctatgaggccccaaaagatgagatcctgacaaaggacaggtggagtctctctcccgagctcaacctgggttctctgaggttgattcttgtaggaaggagggaaatacacagaaatgactacagccatcccccatttcccttctttgtagtgtctcccctgtcagtgaaaatcaggtggcatccagtgagggctacgtgctgttctaccaactgatgcaggagccacctcggtgcctgtgacaccaccttgaagccctggcacctgtgaaaaccttttcaacaccctcaagcccccaggctccccatttacctcagagacgtctatttttgtgtctttttaatcggggagggggggttggttgtagctcccattattttttttattaagaagcacccttccaccttgtttcctgtcccttgtacagagctcaccaggcccttgaccatgtacagcccccagaacctctgcaatctcactttttttgtgaataaatttattaagaaaacggtgttcacgtttgtatttgcgggtaagagggaatggatatccttccagactttggttcaattggatctttcttggacccagttccgtctctgaacaggcgggggcgctctcagagcagaaggaaaagaacagggattgagtaggcctcactcacacttgtgccttaacagtttagtggtatactaagaagacaggccttgagacttgtgaagcctcggagaagcctaaagctagagtgcaggcattggcacgccgggtttggcggagaggggaactgcccctcgagagcaaggcacccaagaacccctgttgacaaacactggtttcgttgccgggtggccctagctcccgtagggcctggctgttgctaacatcaaagagctgtttatggcgctacttccccacggacgggcctccaagtgtctctctccagccaaggctcatggggccctccagggttctcaccacgggcctaggaagcttgagctggggaatgctaactccgggattcggcttttctctgtcttggcccctggggaaggcagtaccggttatcacaactaagtcagcctaggcaatgaaccggttaacctgttccaccgagctgactcggtaagtggctgcggcttggctggcaacgtcactgctaattcggtgtttttcattggtggatgtatccagaactcaccaatccagaacctgcttcccaagacccaccaatcctgaagcagttaagcgaagcgcagctgcgggccgccagaatggagtagacggagagtgagtcgcagggaccttaagagttaggggcgggattagccgacttgaacctgctcaccggctgagcctggggaaaccgtgtgctgcagggttctggcccccggagggtttgagctggggagatagtgtgggcgtggatcttatctgcacaccaccaggagagactgccttagggcctctatatcattcattttctctggttccccctatctcgtggctaagtcctcgcctctgaaagatctcactcttccaccagcacgtacatgcgcgccctgccttagtgctcacaaatcagtaagtgcccagaagtgcggtacgggaccagtggggtgtctgcagttgtaaaacagggtgcctccggttctgccggggtgtctcgacctttccccccaggccttacaatgggccggactgtgatcgtgcttggcggaggtatcagtggattggctgcaagttatcatctgatccgaggcccctctccccctaaggtgagtccccactagaaccagagaaagactcatttcatactcttactaacattttcagcagaaactggatagattctgtcccatggaatgtgcagtccccccaaccccgtccccagtcccttttccctgcacccacagtgtctcactttgggagccaggtgatcttagtggagggcagcaagcgtttgggaggctggatccgctcagtccgaggatcagacggtgccatctttgaacttggacctcgaggaattaggccggctggagtgctgggagctcggaccctgctcttggtgagcctcgtgtggaatgtgtaggacaggtagtatgggagttttccaaacggatagagttgcagaggggaaatacatttgttgggtcagtttttccttagtgtgtcctcttcccgagggcttgtggagaacaggtttctgagcttggcctggagtcagaagtcttgcctgtcccggggaatcatccagctgcccagaacagattcctgtatgtgggcggtgccctgcaccccctaccctctggcctcaggtaacacctcacctcctaactgtacacctcttctattctctccctgtcagcccttccagccacagaggttaaatgaatgaaaataacccccaggagctgggaaggtgactcagggagttttcaccatgccttcctccatgcagggggctactccgcccttcaccccccttctcgaaacctctgttttgggctgggctgagggatttgatgacgcccaggggcaaagagcctgatgagactgtgcacagttttgcccagcgccgccttggacctgaggtgacactactcagaggtggtctcaaacctctcccctcctaaaccagctcctaaactctttctattgctggaatctccaaaactcggtgttgggaataaatgccttcctttccttcccatcctttgttacagtgggaacacccccagcacaaactctctccttcctcatcccctcccaaacagggccaatggaaatcagccagggtggcttattccttggcccctcagacctagtcttacccttaaggtggcatctttagccatagacagtctttgccgaggagtgtttgcaggcaacagccgtgagctcagtgtccggtcctgctttcccagtctcttccaagctgagcaaacccatcggtccatattactgggactgctcctgggggcaggtgaggggaggcattggttcaaagggtgaaatgtaaagcctgacaaaatgaggtactttgtacaaggggcactattttgataatatatattttttgcctcctcttaggacagagtccacagctggattcctcattagttcatcaggcccgggctgagcgatggagccagtggtcactccgtggagggctggagatgttgccccaggcccttcacaaccacttaactagtaaaggagtcactgtcttcagaggtcagccagtctgtgggctcagcctccagccagaaggacgctggaaggtaggagaaccctctggagtatagtgaacctgtatcagtgttagtggttccgttgttgctgttgaatatatttagcaaagtttcatatgaaaatgtgcatgacctgattttataccatagtaaaatgggtcctctggggagggatgtggacttcttgctgaacatccatttctttaaacttggtccaagactaaaccatggcactctttcctcatatgactaccattctaagactctgttgccacctgtcactcacaacattcataaaggcatcaaagagctacagtattccttggacatgtctgccaccttgaaatgtcaataacttcttgtccataaatttcttctactgtggcgtgaggggggagctgaagagatagctcagcagctaagagcacatacagcgttttgcagaagacctgggttcagttcccagaacccacattaggtggctcacaacttcctgtaactccagctcaggagatgagctctcctctactggacttcaaaggcccctgcactcatgcgcacgcgtgcgcgtacacacacacccacacacccacacccacccctgtgtctttgagtggtcagggctggtagcactggacttactgttttcttgccttggagaagctatttagatattggttacctcaggtccctaggcgttattcgtgaaccttcctcaaaaagcccttaggtatgcgaatagaagcagtgtttgtgagtatctggggacaggaaaaggacacccaccttcactgaacatttcagagtggccacactggcctcttcctggtccactttctgggtttacagagaatttttgttcagatgatattgtcattcatgtccttcaccctggatcagcatcaggtctttccctgtctcttgggacctgggaaactaagagtgaggcaggaaatctcacttacctataaagtcttcatagcactgtctctctccaatgttcttatcactcaggtgtctctaggggacagcagtctggaggctgaccacattattagtgccattccagcagcaggtaatgggacagtccctccctttccctaaacatcaggaggcaattgtgtgtgccctcctgtaccagcagtgccacgtcaggttcctgaactggtcatgcctgagggattcctggaagacaaagctagcctagtatgaatgcctctgtttgatccccagtgctcagcaagctgctccctgctgaggctgcacctctagcgcatgtcctgggtaccatcactgctgtgtctgttgctgtggtcaatctgcagtaccaaggagcttgtttacctgtccaggtaggaggaagaggtggaagtaggggagacacaggctgtgagagcccttcccttgtgatccagatatcttcctctctagggatttggacatttggtgccatcatcagaagacccaactgtcctgggagtcgtgtatgactcaattgcctttcctgagcaggatgggaaccccccaggcctcagagtaactgtgagaggaagaaattttgcttattgtggtttctaaaggacttatctgggcctttgcataggtacgggtaggatggtcaatgctctatttcctataggtgatgttgggaggctactggttacagaagctagaagctaatggctgtgaattgtctccagagctattcaaacagcaagcacaggaagcagttgctacacacttaggactgaagaaacaaccaagtcactgcttggtccatctacacaaggtgagttgaaataaattctttttagttccctattgaaaataaggactactgtgtttttcggtatgtcagccaaggtcttggaaatcggtaataaactttcccttgcatcttatctctccttagaactgtatccctcagtatacactaggacactggcaaaaactaggtaagttggggaaagtggctgggctgagaaagtcagaccccagctataacattcctttcatcctttcttacctttcagagtcagctatgcaattcttgaccactcaaaggttgcccctgaccttggctggagcttcctatgagggggtcgctgtcaatgactgtatagagagtgggcgtcaggcagcagttgctgtcctgggcacagaatctagcagctgattctccctctcctactcatgaaaataaaagttgcttgaacttaatttggtcttgccattttgtcagcctacaggcttgtcggggccaggggtggtgggagaagataaagtagcctgggatgtagaaagcacaagcaagatgagacaaagtcctttattagaaaagatatcaaaatcccagccccctggaccaagaccaaaggagctactccagcactggcaggaaatgccctggtagaggcttcctccaccagacagcttcttgggaaccataaatagaataaatattcacagaggtcccaggagaagccaggtcactcttggaaaagagtgatgttcacagacgaggaaggggcttagggtccagccctgctcctaccctgggggcaggggattaccaggatttgtcgcataaaatgacatcaaggattcacagtcataagccctgagaggtgaccccctagaaagaggaacctccaggtctggaggagcccagctcctgtctagcagtgaggagaggtccctgcccccagcacagcactagaattgagatccctcacacccctctgaaagcagtgaggagcaggtgtgggggatacgacccctctgatttagtttcatgactaaagtgggcaaagaagaatcagtgtgaaccatggggagctgtgtggttggcagtaggcagaggaccaggcctagcggggggccggcgttgtaacatctcttgtcggaaggcctgggaggaacctggtgggtatcggggaccagagggagcccgaggaccccgaggatcagtcccaatgtctgcagtgatgttggtatacagaggacccagctctttagccagcaactggtatgtcagtgagttcattccatcttgtgtccaagaattctgggtacggaccaggaggtcaaatctgagggttaaagggttacttaagactaagatctaaaaagaatagccagggatttagggacatttaagggtttcctgaagagaggaagagtgggagtccaatgacaattccgttcctacctgtggggattttcctcattgcctttgtcccctctgtgcttcaccatcttatagtgtcccacagaggtgggtggtcgagagatcttcatcccagccaggcggaccctatgagaaaagggagggactcttggaggagctagaatggaagaaaaaaagctgctggcagatgaatgagaaaagtaaagaccatcaagggagtgataacatacacctgtacacgaagaatacttatctgtctgggaaggaaaaataaataaaactgccacatatgaaaaggcaggagaaaatcaaacagaagataaagatggctatacctaagtaagcagcatctgacgccaggtgccctggggccttacaagaactggcagagggagatttgtaattctcataccttctttctaaatggctcctaggagttgcccttggagtcgtgggaggacacagaaagaggccattttgtctaaagcatagaaacggcagacccaaactcagccacctcagccttttccccttccatgctgggcactggaagtggagtttacctatgctaaacaaggaactactgagatgcacccctagcccagcaagtcttatttagaaatagtgtctaaactacccaactctttcccagctgctgccatgtgtgaaagagaacagcagaagcagatagattaatcaggaccttaaacaagcccaaattctgaaacacagaggcaagaggtggaggcagtttcacaaagaactcaaaaaatacatctaggattttcagggtatgaaacacacgcagagatgagaattctcataaagatgtcattgcaagagacagaaggggagggaggcaatgggtccaggatgccaagctcaaatacactttaccggaaactggttcattggaggctaaagctggatcttaccccttttcccaagaatataaccaacagatctatctagaaaagtgaaatttgacagaatgggcagcaggggttaaagcttgtcctgagtagactaaggtcaagggaaaggaatgggctcagtgcagaactaggaagctaaagatctggaagattgtggccagggtttgcggaagaggcgttgcaagaagtctgacctggtagcgatgtcatcatcctcaccgccccagccccagtattcattggggaagccattcatcttcaggtattggtcaggagtgagcgctgaaaccccaccaaagtactgggggtatgggaggctaaggagaaaaagatcctgtatttcacaaatctggaacatcaaccctatccacaatccccttagctctcctcctcctacaaggttggttcccctgctttctagtgcctttccaggccctctacctgtatccaaacttgttcatagcaacagcaacatggcggggtccccgggggtcacacacatacaggttatgatcattttctggaaggaggtccacatcatgtaagaacaagcagtcccattcttcatctcgcagggcttcccgcaccccaacattcaggagctttgccctgttaaacattccatttccagcctagaagataatgagagggaccaggctacacatggagaaggtaggcggcatgcgtgctaaagtgaaaagaggggcatctaagcggaacatgggggccaacagaaggaggaacacaatgaacagctgagcacagaggcacctggctgtaaccccagcactcaggagactgaaacaggaagatcttgagtagactctaaacaaaataagggctggagatgtggctcagttggtagagtgttatctagcattcactaagcccttggtacagtcttcggcactttgccgttccaaaaccaagtacggcagcatgtgcctgcaactccaccagtgggaggggagatgggggggcagaagttgaagggcatcctcagctacacagtcaattctgaggccagcctgggctacatgggaccctatctcaaaaagcaaaacattcatttgtgcaggcaacacacacccacaaaataaataaaactaatgcaattttttacaaaattacagaactagtattttagctcatccttgaccaattccaaatttgcataagccactcaacaaaggaaaaaatcattaaaaaatataggagagtaggaataccctaacaggatagagagacagacctaacagaataagcatgggactaacaaggctggaagggcaaggcttctccattatctattgtctaatcctcttaaaatagatgagagaagatgcatttatttgaggcttccttaaaaaagtaagcagctggacactggtggtacacagcttaatcccagcacttgggaggcagaggcaggtggatttctgtatggggccagcctggtctacagagttggagatacctggtggatgacatagatgccatatgcaagctgctggcgctgcaggaagggatgcaggtgatagagcagcaggcgcaggtgatgctcgcgggcacgatggggcacaattatggcagttcgggagcgggcctcacatcctgcaggacggtaccggccccctggttccacccggggattccgctccacaatctctgctagtgatggcactgggctaaatgataccgacacaggacccactgttggtagtgaaaggcaagttcagaaactggaggctcaagaagaaaatgggtatcagaatctaagaatacctctggctaaacagcctgattctgggctgtttccccaagggctcactcaaaaatctaaaaagccttgcatttcccttcattaagacagctccacaaggctgctgctggtggtggaggtgacgcatgcctttaattctagtgctcaggaggcaggtggatctctgacttccaggccagcctggtctacagagtgagttccagggcaggctgcaaagctacagagaagccctgtctcaaaaaaaaaaaaaaaaaaaaaaaagacagaaagacagaaagacagctccagctccacaaagcctaaatctgcaggcaggctcttgccttagactacttactttcttattttagggttctacattactttctcttgccccacactgaagctacagtacaagagtaaaaggacttcaacctaataaagccaaaactcatttacaagagaaataattcctaccctggggcatgaggagcccataaaatgggcaggcagtgggaagctcgtgacccaagagagtactctagcttctgaattcatagaccactctatctcaacatcagctcaccttagagtacattaacctaagtctcaagtcatgcctgctcagggccccctgccccccacctccttgtgctcttcacctgcttccctttgtactcacctaggaaaggagatcgctctggacaaaagggtagagcttcagctggagaagccccggcagcaaccggagccccaggcaggtgactgaggttactatagacatcacgaggatgagagtaatcaaatgttgggccctgatctcgaccaaacagggcactaaggcttcggaagccccctagtgaaaggtacatcataactgccagttgggagcccacaagcagggccaatgtgcagggcctctccagcagcctccgcaacatcctgacttgagggctaggaaaagagtgaagggatttctggaaagaaacaggaggggagagagtaagtcagcagtgacaacagcaggcagagatgaaagtggtgccggggagagaaagacaaacagacagacaaagaacaaagtcacaagaaggaacattgatataatcaaacaaggaaaaaaaacccaaaacaacccagaaggtaaccaggtaacaaccaccagcagtccttataaaaaatcaataaagctcaaacttcattttcatccacttcactctgtctccaccctcaagaaagcttacatcattcaagtcccaagtccattccagaagtctttatctccaaccttacaaaagagatagacacacctgtgttcaagctgtcttcttccggatcatgggggctccaggaggtccccggggagcagagatgggaggcattatctaaaattggaactgtcacagaagacagaaaaaggcattccaacagccaatctgggaccagcgggaacagaagagatcaaggagaaccagtcgcctgtacagcagagaccgggataaggaagaaacaactttcttatcgtgagaagtgcaggaaagcgattggaaaaagagaagacgccaggacaagtctctttggggttacttccagtagactactgagtggcaggcaggtcggtacctaaccctctacttcaacaagacgagtttgtttggggagcgggggcaggaaaacgaatgtaggcaccaaaaaaaaaaaaaaaaaaaaaaaaaaaaactattcaagaggcaagacagctgtgacaagaccttggagtggcctagaaaacagtagaacaggaaacgggttctttctgttcttcacgtaccagggagcgcctccgcaggtgcacggtgcttgaccacctgggcgctgcaagcaagagaccctggagcgtggcccggagaagagtgggggtggtgtcctctgcccttttcacctttctgcaacctagtgggggtggggagcagagtgctaggccaagtgatgaagtggagggggaggtctagagcagggtcggccaggacacctgggccggctcacctggaagggcgtggccagcgcctcgcacgcgctcgcgcgcgcgcacgcggggcatgggaatagaattcctttctttttcgggcacgcccatcccaccttagcctcttgtttgcccccggcgtgcaacgtgaaggcaatcggcccgcagccgcgttcccacccgagactctgtctgtgctcagtctggttttccagcctttcctcggaactttccctcctcccccgatctcccgaacctcgctccgaggactctctccaaggtccccagcccaccgtacctggtcaccgccactgggacagccgggcaggtatcgccgccgccatcttggaagcgggcgctgggggcggggcccgcgtcacggggcggggcctccggcgggcaggcgcaggggcccagcaccgcccagcctgctagcccgggggctggagccccgcaccgccgagaagctcgctggtgttcgcggaggagtcctagaccccggcttcctctccacctcacagtctcctagccgggtccccttgctcacctcagggcaccgcggctcaaagcccttgtttctcagtagggctgagaaccggtttctgatgcatcatcggaggacctcaccccagggtaggctgagccctttcccaagtgtgtcatggcgccccctgtagcctagtgctacttagtatcgaaatttttcctaaggttactgtaacacgcacgccatttgtatccgcatggttaacatttgtatccgcgtggttagcatccgcatgtgcaccgagagacagtgtcggctctgatgtgaatatgctttcctaggtatgagactaaaatggacgctgcaacgatgtgcaagacatttaatcccggggcttctaccagcccatcgcaaatgttcatgccgaggaaaaataaaagaccagttacttacagtttttgcctggggatgggggtgggtgtgggggtctacagacaatatagtgcaatgataatgatgacctgaaaagggacacctcagtcacaagtggtgatcctgggtaagcctctcaaaagtagtcgtgtctcttgggaagcctgaaggacttatgcacagcatatcctgctttaaacattgttttcatgaaaactgccttacaatacaactcagtataggtgagtgacctgtatgcaaattatgtcttgtctagtaaacgccatttggagaaaaacaaaacaaatacgagagtatttgtctccattttctcattcagttttatattcatttgaagcaaaattctaattaaatttctttggggggggtttcaagacagggtttctctgtgtagttttggagcctatctggcactcgctctggagatcagactggcctcgaactcacagagatcctcctgcctctgcctcccgagtgctgggattaaaggcgcgcaccaccaacgcccggctaaaattctaattaatcttattaacaaaaaccccggggtcaaatatcagggtaatagcctgaaagataaaagaaacagaacagtgacctcttacctctctggacctaccctatggccaaaagggcccagatcctgccctaaccccactttatcacttcctgtctccattttcctaattctggaacataatttcaacctagtttttttttatttatttattttgtatatgcattggtattttgcctgcatatatgtctgaatgagggtctcagaactgaagttatagtggtgagctgccatgtgggtattaggaattgaatccaggttctctggaatagcagccagtgctcttagctgctgagccatctctccagccccccccccttcagcttttattacacaagatacagcaatacattttcacacagtgtacaaacatcccacaacacttctgcaattttgctctaccttggtgtttcattccttttgttgttgatgtttttgttttccttgtttggttctgagacaggtcgtacatagttcacactagcttggaactcctgatccctttgcattctgcctccagtgctgatatcacagatattattgtgtgtcatcacactcagctactttgcttttctgtttctgctttgttttgtctttttgaaacaggtggtgccacctggtctggtactcacggcaatccttctgcctcagtctctcaatttctgaggacttacaggcatgagctaccacatctggcaggtagggttttattcatgcaagactgaccttcagttctttctttttaaattttcttaccttttgtgtgtatgtgtgtgtgtggtggtccatgtgtgtgcatatatgtggaggctataataagtcgacttatctttcagatatgtttatttttaatttttttagatttatttattttgtgtgcatgaatgtcttatctttgtgtatataagtgcaccattacatgcctggtacccacagcaaaccagaagaaggtattagaaaccttggaactggagttgcaggtggctgtgagctgcagtgttgggagggcactgggaaccaaacctggtcttcttcaagagtggcatgtacttttaaccactgagccatctctcttcagcccttcaccttgttttttgagaccagatctggaaattgagatttgctgcttaggctaggctggctggccaactgctctcagagatctacctgttctccaccccagtgctcggatttcaagtacattgtggaacaaactttgtcaactgaactgcctcgttagacccttcttttcgattttcagcttttgaggtagtcttccttccttccttccttccttcctttctttctttttctctctctcttctttttttttttggggggggcggtgtttggagacagggtttttctttgtagacctgtctgtcctagacctcactttgtagaccaggctgtcctggaactcagagatccacctgcctcccgactgctaggattaaaggcgtggaccaccactgcgactgcatcttcttacatagctaagctaagccgtcctcaaatttctagccagtctcctgcctcaacttcctgagtgcaaggattacagtaatgtaccaccacacccagcaggatatttaaaaagactcatttattttgtctatgtgagtgctctatctgcttgtacacctttatgccagaagagggcatcagatcccactagagatagttgtgagctaccatgtggttgctcaggatgagcagccaatgttgatgaccactgagctatccctgcagtccccggtccgtcccatactgtcccatcctgttccccctccccccacccccccagcaggatttttaccttattgttgagactcatgttcctggtttctcctcttcctcctcctttttttatcctttccctctccctgcatctcttgtatatatttgcatgtacattataacatgttataacatgtttttatctgtgtgtgtgtgtgtgtgtgtgtgtgtgtgtgtgtgtgtgtaaaatgtgtgtccctgtttgtgagagctcctgggaccttttgttagttaaagactataatggaggcttagatatacttccacccctctgctccttcccaaggctaattaagtactctgagcctgtccccatataaggtcctgtctggggatgttgttgaatattattgcccccccactcctctgactcccctctttccaagcatatttagagctggtggtttcctccagctgtcagctggttactcttgctgccaaagattttggcttccccccagcaaccgtcaatggggaaggtagtcaattggctcagaagtatcatcctcttagccaataaaatgttaatgctttgaaaccactttcttgccccttcctccctgacaagctctgaccaataaggtgctgctttgtcactgtcaatctagtattttagagagagaaaaaaatactgtatggagaggaaaaagtggagctagagttcatgtagaaaaaataaatacccattccatagcactctccagaaatcctggctctcccaccactaccacaaaaatagtgattggacaaaagcccagatttcctctgctctaaccacagaagtttgaatttcagggccaggccagaagggcttgaagagattggttcaactcatgtattgcttcagtctccttcctagctcagatgagtccttatgtatagtatttgccatctcatgaaatgagataggccgaactccacttgaacttcttttaagtcaatcactgcctcttctttttcaagtccctcactggtcctctttttacctttacaaatagatacttaaacaatttcagtgcctctgttttccccctctttctactcctacttccttcttaaagatttatttatttattatgtatgaaatgttctgcctgcacaccagaagagggcaccagattgcattatacatagttgtgagctactgtgtgttggctgggaattgaattcaggacctctggaagagcagtcagtttgcttaaccgttgagctgtctctctagcccctctactactttttttttttttttttttaaaccacatcatagttcaaacctacacaggcaatacttagactggggagtttaagctcatcttgatccatatatgaagaggtgtattccctcatctccatttctagcaagagcttgctggactcaacttcaggataggcattatgtgaagattaaattctggccgtggaggggtagaatatggaagatcattcctgaaaggggtcagggattgactgactttgagggctgggatactcatcttttgaagggctagctctttctgaccccctttcaacatacaaatccacctactcactcaaatcacagaagtaatcttttttttttttaaggatttatttattatgtacagggtgtgctgcctgcatgtatgtctacatgccagaaaatggcaccagatctcattatagatggtttttaagccaccatgtggtttctgggaattgaactcagaacctcacgaagagcagtctgtgctcttaacctctgagccatctctccagccccagaagtaatctttaaactcaatactttctaaatttttttcagatattttaatttgaattagaaacaagattgttttacatgtcaatcccagttccctctccctcctctccccccctaccatccccctccccaactaaaaccctacctatcacatatcctttctgctccccctggagggtgaggccttccatagggtgtcatcagagtctatcgtatcttttgggatagggcctaggcccgcccccgtgtgtcttggctcagggagtattcttctatgtggaatgggctcccaaagtccacacctatgctagggataagtactgaacagctacaggaggtcctgcagatttctgaggtttcctcactgaaacctatgttcctgggatctggattagtcccatgctggtatctcagctatcagtctggggagcaagagctccctgatgttcaggtcagctgtttctgtgggtttcaccagcctggtctggacccctttgctcatcactcatccttctctgcaactggattccagttcagttcagtgattagttgtgggtgtctgcttctacttccaccagttgctggatgagggctatcgggtggcatatgagtcagtcatcaatctcattatcaggggggagggcatttaaggtagcctctcctctattgcttagattgttagctggtgtcatctttgtagatctccagacatttccctagtgcctgatttctctgtaaccttaaaatgcttccctctattatggtatctccattcttgttacccttattcttccttcaactcaacctttctgctccctcatgtcctcctcacccctcctcttctccccttctcattcttctagctcccttgtcgttacccagcatgtctcagccttagtccatgaggtgctacctgagtgggggtgtgtggacctggaagctccgagcaacccaatggtgataaagaccaaacacaggcatcttgtcattttcagagagctctcagttccatgttgtggaactagagtcatttctttattagccatcttttctggtgtttcttaaccatcctgctaataccacaaggcaaccatttctctctactcctaactttctgttattcacacacctctagctcctccgcccaggtgagggcctattcagctgcttaggcacatacagatgcaaataagaggcatattaccctgaggccattgtaaacagtagtagccttactgacattaacaatacaatagggggctggagctttccagtgctccatgtttagcgagacccaaggctgaatctcaaaatattccatagtggaaatactttggtcccccacacttcctcccccctcttcccatgctcccaatttgctcaggagatcttgtctctttccccttctccaggggaccaagtatgtctctcttagggtcctccttgtttactagcttctctggcactgtggattgtaggctggtaatcctttactctgtctaaagtccacatatgaatactttctaaattttattcatttatttatttttattttatagatatcagtgttttgtctacatatgtctgtgaaccacattcattccttggacccacagagaacatgttgtgggatattttgattgtattcatgacactcccgagcttgcccaataaagttatagctgaatcaaggggtagagccagcaactagctgaccagaattggccatggagaagccaggaattcgaatagagaagatgcacaggaaggaaaaggctgggactagagtgagagctctcttggttctgggatgagggaagagacatttcttgcagtgtctcctgcaaaaagcaagatcagctagttgctactcagcctttctgagctagtacattttttaccccagcctttggctcctgagtcttattgataaatagaacaatagagacttaatttaaacctacatatctcagctgtggcagaactggggctgagggactgaaacccccaccaggctgcagcctaaggggccatggggccacagacgataattaaaatatcagtagattcatgtgcagctgctaagacgacagaaaaacatcaagatcagaagaaagtattggattccatgtaactggagttgtagattgttgtgagctgccattatggatgctgggactcaaactcagttcctttggaagaacagctagtggtcttaactgctgagccatctctctagccttgaatacatttttggaaaaaaattcatttctgctcctccctcattctctctctctccctctcccatgacagggtttctctgtgtagtcctatttttcctaaaactctctcagtagaccagactggccctgaattcattgatccatctgcctcctgagtgctgggattaaaggcatacgccaccactaccacctagccctcctcctccttttgagacaaagtgccatgtagccaaactggccttaaatttactatgatgtagtagcagaggctggccttgaagtcctggtcctcctgtttccaccttgcaaggagaaaatttctgtgtgccagcctagtgagccaagtagtttttaaaaacaacttatatgccgggcgttggtgacacatgcctttcatcccagcactcgggaggcagaggcaggtggatatctgtgagttcgaggccagcttggtctacaagagcgagtgccaggataggctccaaagctacacagagaaaccctgtctggaaaaaccaaaacaaaacaaaacaaaacaacttatatgaaagtgatgtacaaagtaaattgccaagaaccttaaggaaatgtgagacgggctcttccaaagcccatccaaggctcctttttcctgagccctcagggtacttaggctccaggctcagtctctgcaaagtcctttttgcccttgtcttccagtcccttgtactgacccattgctccctttgcacaggtgcagtgtacaaccccctcctcctcctcaggatgcaatgggagctctttaaggacacagtcatatatcatttgtgtttttatttcaccttcaattgaacagagctctgcttgtaccatgagttcatagcactaagttccataaacgtacagtccaattttaccagctagacaaaacaactgaagatcactttagtttcatcccactctctgcctggttggtaggaggaccacaagacccaccagagaacaagaacagcagcgggaacaatgcttgctagatagaggagtgtagccagaccttccctcactgctgcagagtgagcaggcactgtgctgggtggtgtaaagaacagggcaccgtgtaaagctctgcctcatacagaacctgatcagcaaagcctagctccgtagcagactttttctgaactgctagccccccaaatcatgacatggaaacttattactaattatgaatgctcagccttagcttaggctgctagtttctagctagctttttaaaactttttgtttggtttgatttttcgagacagggtttctctgtgtagctttggaggctgtcctggaagtagctcttgtagaccaggctggccttgaactcacagagatccgcctgcctctgcctcctgagtgctgggattaaaggcgtgtgccaccaacatccatttttaaaacttaaattaacccatttctgttaatctatgtgcgtcactgaggctcgtttacctcatgtgtgtactgtccatcctgttttcccatttcttccatatccggcaggctgggcctccagcaggctggccccttgtctgtctgcccaccagcgccacctatccttcctctacctagctatggaccatttagctttttattaggtaaataaggtgccatgggcaggcaaggtgaaatagcaacacatcatttcatagttaaacaaatgcagcataaacaagagcaaaacacctttacatagttgataaacaatgcagcacatctttacctagctaaactcatatcccacaacgtagctccactgaatacagcacagacacaacctctgtggccgcctctcagccgcagagcccctgctttgcatctcaagtcgcagctggcaggtcccactgaaggtgccatggcagagaaggtgcctttggtgtttccacaggccaccctcccttcaggggcctctttacctacagctccttcccactgcaacattcagtcccttccccaatccctagcagttctgcatttgccacttaacattcagaatccaccacacccttgcacacccgtcccatctataacacacccaagactgactaggctattcctcaaggaaaggagatccatttcaacacagtgctgcagcacggaacagatggctctacactcttcttagatccttctccatggttttttttttttttttttttggctcggcttggctttgctgtttattgcttaccagaccacatcctgttcctctcattctcattgaattccattctaacctcacatcttccaagaagtctgttgggtctacattgattgattctggagtcactgtcccagtcagtcatcacaaaggtcacctctcatgttacaatagcctttactgtttgaaatccttgagcacagagcaatgctgtgggaagggttactgttggccccatcctcatgcttataatctaaggttatgtagcagtgacttgcccaacaccacccaggtaataagatgctgagtcctagctcaagttcagatccatcagctcctggagtgccaggatgctactgcaacatcccttttccaccccctcagccatcactctcacaactaaggccactctagtttcatcccagcacttgtttgtgttgagggagttgggttttttgttttgtttttgtatcttcatgttcttactggctatacttgccaagtgtttattatgtctgcttcaggtgattatgtgcctacagacatgatggacataatggcctttcctgacaatctctttcagtcttaaaacagagagagtactgccaaccaaaggatctgggcctgggcataaagataggcataagtgacatggatccttgtcgactttaagtgcattgcagaccctccatggagggtgagtgtggacaggacaatgatgacaataacaacagttgccatttgttgagcacctattgagtgtgaggcattgtgctagttctttatttacattatttaacccttacaaaaactttctaagggaggtattattattggcaaacaagaaaacaaatgctcaaagatgtggggccaatgtgcaacccacatttgtctgacccccaaaggagcatataaatagcagacctcaatatgtacatttaaaaatatgataatccctcactccctgaaggccaatcctacctttggctctccctttcccagccaaaaagaaaaaaaaaaaaaaaatcaggagaggaaagcagggcaggttgtaacacacacacacacacacacacacacacacacacacacacacacttgtcaccaccaccctggatttcatagctagggtggggatataagaggtgagtttccccaagatcctagtccccttccctggtgctaaataaaagtgaataataaatactaaataaatacaactgggacccgggacccatcctgtcttcccctctccctcctgtgacctgcagggcagagggggcagtttagataggggacagtctcctagcccctttccattcacctacatatcactgcctcccagggcaggaaaccagggcagggccagcctgcagtttagggcagagagacagggcaggtctcaccctctacagcacttcccgactgtgttttagcatgaggcagctgcagaagccccctcattctctcagatgagtccgaggccccggcacccccaacagggcagccgggacagtgaggttatttcctgcctgcccagggacgcttccggatgatctccagaatctgtgcccggcggtgcagccagtcttgggaaggagggcgtggtgttgaaggaaccggccgtggaacgaaaaagctgtaccgcagacgtgcattctgtgggttgccagccactaggacttgcagtgtcaagggctgggccagcgggccgtgtccagacagtgtctctgaggctgccgtggctccactatagcgcaagctgactgccccagaaagtaccacatctgtgggggagggcatcagtgtgtattcaccattgagggcataggaaccatctggaagctttagggccaggtagatgctcctggggcctgaacccccctgctgccgaacaaggatatgggtggccccagcagggatagtgaccacatcactgtatccatatctgtgaggaaaaagtagatgaagaactcagcatctcctgaatcccttcagcttgccctactgtgtttgtctgagtgtgtatgtgtatgaggggttgcctcttcaggcctatatgaggtatgtgtccacctgagaacagagttaccagcaaatgtgccttcctcactcttatctttggacactttgtactgatgcttcttactgatgtatcctttccagtcctggcctcctcggggcctgcccagttcctactcttggctcagaagtcactaccatccaggtaccactactaccaagatgccttcaaaggctctcacggcgtcctgagttcaatgtgtggaacagagtattgtaactatctcctgtcttccactttacctcagaaagagttgcgtcaccaggcaagcatttagccccaagaccagaacaaccaccagggaaacagagggggaaaagaaatggtgagagcacctgaattttttgaaggagcctgactgcttgctgcagctagaaccattcccaccgcagaccatgcatttgtcaaacttctttttggagccaatgatccggtcacagccagcatggatacagcgcccctggacacagactgaggagctgtctggggaacagggagttccatctgccacctgaggagtagaggagggacatgcttaagggttcttgctaagtcagcggggggtttgtaagctgaacatctggaaagtggtgtcaggaaaaaagaaaagaaatgggtgaggaagggaacgtagactgagagctttcacctatatggcactgtaatgataacagtgatacagttatcttccagcatccactatgaatcaggtgatgtgcaagatgctttataaacataaacctaggtcccacagttaccccatgagatttctaagggtgagttctgaggtttacagagatcacaaactgggaaggcaagggtttttagcccctgcaacaaactctacacttaatggggtccagcctctggatggacactagagggcaacaaacctgtaggaattttctatagaagacggcaggnnnnnnnnnnnnnnnnnnnnnnnnnnnnnnnnnnnnnnnnnnnnnnnnnnnnnnnnnnnnnnnnnnnnnnnnnnnnnnnnnnnnnnnnnnnnnnnnnnnnnnnnnnnnnnnnnnnnnnnnnnnnnnnnnnnnnnnnnnnnnnnnnnnnnnnnnnnnnnnnnnnnnnnnnnnnnnnnnnnnnnnnnnnnnnnnnnnnnnnnnnnnnnnnnnnnnnnnnnnnnnnnnnnnnnnnnnnnnnnnnnnnnnnnnnnnnnnnnnnnnnnnnnnnnnnnnnnnnnnnnnnnnnnnnnnnnnnnnnnnnnnnnactctgtgatacagagggagtgtccacattgagggactggctgtccaggagtcaatactttgacagaggactccatggaaaggagtcaaggatctccaaaggccacacacatgcatccattctcaccaaatgtggtgccaaaggatggagaaagaggggaggaatcagagctacgaccagttccagcagcttcaccagccacatatccagagtcaggcatttgttttcctaacgctggtcacccatggacggacagactgagtaaatctgtaggctcacatgacaatatgaatgccaacaatggtctggggggactgttttctttttttaaattagaaatcagagggatcactgggaagtgtgtaagccctgactgggcctgaggatttctggtcctcacccgtggttccagtacgtagtagtaacccagtgcccgggcctggcaggtgagtttgcactggtctcgaggggctacacctgtgtagcgagggacccaatccatgggccctggaaagctcttgaagaggtcagtcctgtggttgtaggcagcacactgctcctcacggaaggtcaatgctgtagggataagtggacagactgagcctctctgtcctcacactgtcccacacacccttcacctagcccttcagaactttagccagaatggcatctctctccctcacagattgtcaggcagggacagttctggaaagataaagaaacttcccccagaagtagagtcagccagcaccttagttctacactcaaggggcagtccttcttgtctaccatcctttcccaggctcccagtcttcccagccctcacctgaaccacttgggcagttctcagtgttgcaggagcggaagcgggtacggcgaccctcgcagtacttgccaccattccgggggacgggccttgtgcagtcccgggaagagaactggacaccacccccacaggtcctagagcagtcaccccatggtccccaggaaccccagcctccagcctgtgggatctgcaggggcacagaatggaagtgggataagcacactctctcctaggtttagggccattcttcttcctacaggccttttacccaagccatgccctgaggtctcacattgaattccttgagctggtccacgtgaagacagcggccgcccatgcaggcctgtgcggatccgcagggagtaccatcagcccagggtgaatgcttagtctggcacatagcatggccattgaggtggccagagcaccagagggcagcacagggtggtggcagctgtggacaatggtgtgagtcaggcccaaaggtcagttggcactggcggtcagcatcatagtccttgccaggaaaagtcactggcagattcaggggagcctctggtttgtctaagagacagtgtcctgaaagggggttaaggtacaaagttagcaagggcctgaggtgggcactgaggattgccagctgaaagcctgggctcgtggtggctaaggtaccctcagcgacactgtattagatgtttatcatgtgatctgactggcaaacccctggtccacactagctcacttactaatcacagttctgtgaggtactggctattagtatatctaatttattagctaactacagacacagaaaaatgagttaagttaagccgcatgtctgagagtaacagagaactcatcagcataggaacctaaagcacctctatctgaccttacttaccataggatttattattatgatttttagcacttgggcttttaaaactttttttcttatcatattcacttacttagctcaggggaatggagtctgcacattccacagcacatgtataagaggtcagaggacaactttccagaggtcatcaggtcatcaggcttggcagcaaataccttaacctgctaagccatcttgctggctctatttggagccttggggacagtttcactctatagcattagatagcctggaactcattagtacatagcccaagcttgcctgagagtcgtgtggcaatccttctgccttagtctccccaatattaggattataggcctaggttgccatgcctagctccactatacattttttaaaaatagataaggtctctttatatagtcctggaattcactacataggccaggctagcctcaaactcacagaaatccacctgcttctgagtgctgggatcaatggcatgtgctaccatgcccatctatagaattcttgagaatgcttctaactagcaactttggggagctggaaagatggctccacagttaagagcacttggagaggtctacagctcagttcccagcggctgcatcaagtgactcacaaactccctgtagctccaggggatccaataccctttccctggcctccaggggcacctgtaagcacacacacacacacacacacacacacacacacacacacacacacacacacacacacacacacacacaccacacacacacacaacttaaaaaaacttaggagaaagttactcttctgtcttgtactctttatcaaatgacaatgtaattacatgatttgtagccagtctatagccagtccattccaacattgaacagttctagcctttaaaaggtcagttctttttgtttggttggtttttttcaagacagggtttttctgtgtagtcctggctgtcctggaactctctctatagaccaggttcaccactaactcagagacaccctcccatcccacgcctctgcctcccaagcgctgggaataaaggtgcatgctaccactgcccagcttaaaaggtcaattctaattgtatggacccaacatttgcctcccttacctgtgctatttgttttcataggaagcggggaccacaccaagacagtagtagcatttctcaccccatcacatgcagcagaggcagaacacattgaggagttagtggggcccatggagaatgttccagaaacaagagtacagcaggaattaagtcttgctttggggaaggtgtcacctgcttaccgtagccattgtccaggaagtcagtgatgaagcgggcactgcacggggaccaaggctcctcagggtccacatgagccatgacaggagccatgacatggcgagaggagcccccatgcccgttcaaattaacacatggcttggagttatcatggagcatgttgaagacatggcctgtaagagaagaggtcctgctagtatccaagagttccatcctgtgtcctcaggggtggaggtgggggtgggggtgggggagtccatcataaacctggctgcagctgttaatgatgagatctgactcccccacccccatctcaaatccccttatagttctctgaaggtcccatgcgtagctcttattgctgtcttctcctccccaaaggaaaggccccttctgcttgatttccattgtaactaacattcccagtcctcaagcccatccccttactctctccccttccaaacatgtgtattcatgcacacatatacagttcaaagtagttcccacctgctattttatttaatagaaaaatgtgtgtttctctctctgcacccagaatagagaaggaattgattgaccttggacctagacctggggaggaggagaatacctcgatacccccatttgcactctagtgagtcccttttctccgtatagcatcctcaggatccctcccattcacttcaggtgcacactgccccagtgctaccttacccagttcatgagcagcggtgaaggctgactggagcccatcatcctccacaatagcacagctccgggctggatcacacactgtgcccacatcagccatacccagagtgtcacaagtagagaccccacacaggtcctgtggagaaggagcacagaagatgcttggggctgatacccagattagtgaggacctagatgccagagtacccagcatggtcagggcccagatagttgttaagatggaagcttcactccagctcctgggatgttatggtggagggtccacccaagtccccctctcccatctccccccaaaccctgctgcatctcagaaagcccaccaaatgatggcccctcccccagagatgctcaagaccactcccacagggtatttaaactgtgctccctagtaaacaaagttgtggttttttcggtcttgctctccctttcctgtctcctctctgggggcgctggaaggccattagggagcgctgtatccattaaacctgggctttctctaattcagcttgatttggtctgatttgaattgctgaatttcggagagacttatcagggtgtagaaacttttcaacagccaccccacggcagtctggttgagacctggcgctagtggcacagctccaggggcgcccttttcccatcatgtttgtgtatcgccagggtctcttggtgtcgtggttcattgcatgtggtgccgactggggccttacctgacgggtgaacagaatggctgtgtcaaagtggttaggatctgagtcctcaggggtgttgaggccccgctgccaggtgcagaagctgcgtagggtctgggcggcactgggccccacttggggcccttcctggcccgaccccaggatcactagccgagtcaccaccaagctgacagggtttcggatgcttgggtgcttaaaggccttggctgctgctgccataactgtcaacaggtagcgctttaaccctgtcccgtgaaatgctgccatcttgtcatctgccaccaccagtgtctccacgaatctactcagagaagcaaagcgctgaagaggggaaaaaaaaaaaatgagaggagggtgctgaaatagcttcccagatacacatggatccttctcccctccctctctttgtgggtctagaactcagcagagtcagctggcccttacatactccacaggattcctgaagtgactggtttggaccctccccctagccccaaatcccagggcttttgtggtaatgttgaagaatcagctgttgttctgaaagaggagaaggcttgccacgtttcagggctgagtgggccccagaggtgaaaagcagctgggactgcttcagggaggggcactggggtccttcagtgtgtgagtgtgtgtgtgagtgtgtgtgtgtcggggagggggggagttgtgggagcagagctagagggctgggctgtgacaacgacgtgtctgccctgtgtggttggaggaacaattcagtcagcagctagggccacagccagatctcagcgtggcgggtgtggaaggagcgtctggtctggattaaagctagagacggggtgggagagaaaaagggggagacccaggagtgggagggaggaaaggatggcgcctcaggcagccctgctgtcagcccacagtgtgggaagagggttgacccagaggtatgggatgcctctcctcggctgcctactccggtcctagtttgcagttcgccagaacaattttaaaggcaacgtcagaagccaaaaaaccccaacccctcaggcctcaaacttcactcctctcgatgggggtgggagtaaaaatcactggggcagagaaaaaagcctaggccaacaggctgttaggagagctttattgctgggaactgtgtcagcaggagactccatggccaggaaggggcggggtagggagggggagaggtcattccagcccagagaatctgatttacctcagggaatcctcagagcaaagcaaatggctaaggcagggagaagccaacactttacaaagtaagggtagtggagagacgagaaaagctgaaaagctagatagacgtgggggcgggaggggagacggtgaataggggtcagtagggcagacgtggcgggaggatgatacaggacaaaaaccgcagggctgcctaccttggttcttcggggaatgggattggggctcccagaaggagccttgacgttgcacatgggcccttggctgctagcaggactcttccggcgtaggatgtgagcccctggtcccccagcagagttaagggtgcctccctccagaggctggaggtggagttcagctccccggtactgcaacacccctagtagggctcccccgtcccagtgcagagatgccaccgactccggatctccattgatggtgccagtcaggtaggtacctggctctgccccacccagcatctcaggtgcctggcccaagtactgcactgtgagtccctctacctggaccccagggtcctgctctaattccagtagtagcacctccccaaaggctggcaagcggtacagcatcctggcaggggtacctgagccaggcaagatgctcccattgagcttctctggaaacacaatttcctcctcccgggggagggggctggctgaccaggctaaaggcaggagggaggccagcagcaggagtagccaccactccagaccagagaaaggcacagtgtgaagctgcaagcggagctggactcttcgcagccggtgcccagtcaagcccctcccgggatgcaagtccatctgggacatggtaccggtgctgcagctgggaaggattgaggccatctgaggcaccaaatcctccacaccctaactgtggaaagctcctcgttaaagtcggagggctcagacttgtgccaaaatctgaggcgaaattttgagaggggctagagatgctcagagaagatgaagaaaagtgcctagggacctctctcctccaaaacttcctcctctgcccttctctcctgggtctttgtctctctccctgtctgtgtcttcttcagcttctctggcttctccctctgcccagctgtgtggctttgcctcagtgcctgctctgcctcctttggctgtctctttgtctctgtctctctcctcgacagtctctttcctttctgtgtatcagtgggtctcccccgggttctccccagcctctctccccgccagctcttttaagcatccagaacctccctctgtgtgtgattggctgatctgtaagccactcagccagctcgggcagtgggactcagacggatggatggatcattgcttcccaacgaccttaggggtttccccccccctttctttctttctttcttttttttttctttcccttaaaaaagaaagaaaaaaaaaaaaaaagagggacttgcccaggggaagggaatctctagcagccagatgcattataggcagtgagccagctgatgacacatccttttcccaaatcccaccaccagccctcagctgtctctttccctttttggtgggacagagccccaagggaagtaggaactcggggaaagggcctggacaacacgcacacatgagatttttgtcctgggagaattcatgcccctactgtccagcctggaatagcctatagtccctcaggtatcaccttcactgccctccaccccagaggcagatttctagggccaagctgtctgggtttaaaaggaagtggggaacagtactgagagagaagagaggatgggaccgagaagaagaggcagtagagacagaaagggaggagacagcagtcaggacctttctgttggaatgcaaacaagaaagaaacagatgacaaaggaggtgggtgattgaggaggctgaaactacactactattctttttataggaagaagactcagagtatgtccccccccaccccccgctatgctttcctgagttacccttactctatccaaagcatagaatggccattccaccctaggcctcctcctcctccctgacttcctgactgcccattcccctggctcagctcccagcagctttccctaggctcttggccccgttcctacctactcccaaccaccccaaaccctccccctttctcaagtcagccagcccctcacctagacaagacatgctctctggggaacccacaattactcaaagtcaatccctagtccctacacacacacacacacacacacacacaccgcctttttcgaatccaatagttcctggaatatctagtaatctttgactcctcattctccatggggcagagcaaaaaagtataaatatcatttgagggtactaagagaaataggagcctagaccatggggtggacatagtgattgttgggagcatgtgcgggggtattagagaagggagctaatgacttctctgattcagaattggggtgggggactaagaaaataaatagactctaaaagcaagaaagccaagagttcagaagtgggcaatttctgttcactccaccctgtggccactcgtttccccaggaaatccccaggaaggagacgccacacagcagccccttccctttcccagagaagcaccacctcacctacccctgtcccctttattcattctctgccttgtcacctcctgtcctccacatcatactcatcaaaatgcttcctctccccctcccttcctgctccagtcactaatacctgccctggtgcctatcacttcctgaattacccaccctgttgtgacttccagtctcacctcttgacctcatcacatgccctgaccctcactggtcctgagcagaggggctgaggctggaggagtcacacaagggatgcgggaccagaaggtacaaggggcaagaggagctgtcaccagggtactcttattgctcctttccatccccccatccgagaagagaacaaagagggtgactaagcagtgaaagacaaaggcccatagaatggcagccacagctcgtggggggtgttggcagaagggagaaggcacaaaagatgcaatgtcctaggtggccccccaagagccctcatcccattttaagctccaactacccccagggctaagcaagctagaggctatcttgacttctcataggctgtattaacacaaaaatgagtaattcccctcctctcttcattatcacatttagtgtttaaactatatttcagggaagaaggcctagaaaggggagggtatgtagagggtaagggaaccaagcctctaccctggctttctggaggttgccttgctacaccaggtcttggtcagttcccacaaccaagggatctctggccccaccctttggtatggttcccattaggtcaattttcagcctagaaatctggcttcctcctcttcctctgcagctaagaattctcagtgccactcccctggtttgtctgctccacccagatgcactgctggtgggctatgtcccagggaccctgtctgggggagacgtgggagaggcctctttccaatgagaaaattgtagaacctcaaagagtgggtggcccagctggagctgggcttggagacaaaaatcaacctccagggcaggaaaactctttgtccatacagaattaggcccagagtcctggtgttattattacatttctatgttattaggcacttctgaagaggactctgacagtgtgagactgtcctgaatggaggtggggcaccaggtagcactaagaatgcttcctgagtctgtgattctgtaggttcaggaatcacagggatataagggtcactgacaggggatctccatttgcaccgacgctaccaatgttggtggtcttggcctattcctttttgttttggtgagctcttaggatcgcccaactgcacttgagtccctttccaaaatcccaattccggaatttggaaattaactcttagattccgtgaagaaaacaacgtcatcgaaacctgagccttcagtcggaaagcaaaaaaggactaccgcaggaggatgaccaagatggaaatagtgaaggaacacccatgcagaatgtgcaacggggtcccagtggaagagcagtttgtaaggtaaatttgagtgcagggagaggactcagcgcgaagtgtgggattcacggcagagctgccccaggagagagcagttaatttctcttactcctagaaaagccgagggagggacgcccttactaaagatgactgcagtcgtagttatttaagcccaagtgaggcggagatgcggaatccggatgttgtcgcgttctcaattgaccgccttgccagcttccaagatggtggccccactgtgccaatagaagagaagcccacaaggaggcgcacgggattcacttccgcccggttctccttctcacggcctgcagcccgggaaagatggcggcgctgagggctctgtgctgcctccgcggcgtcggagcccaggtgctgaggcccgggtctgggatccgactaccgaatcagcccagcaggtgagaaggaggcctctcctgcatgcgttctcctcaaaactaggatttctcgagtctgaggacatttcaagggccctgtgaccccttaggaaagaatgacccaggcctgtgaccctccttgcgcgggccagatttctcaggtccctagatgctgtgtgctttctgtagcggaggatgaggggaaagggggatgagtttaccttgccagaggcgaaataggcgaggtgcaagaccctacctctcaaatgagtgttttgagcgtacctcctgtcatatccgaggaagggagacccctcccctttgggtcctctttccccggttcctcgctctccctcttttagtcgcgtatacgtgtttgctctttctctctctcctccctctctcttagtaatcttaccatgaacaagtgctgttctcaacattcgtattcctgcaggagctggaccccagctttgtgtgtcccaaactgcactatggcattgaggaacacagccctgcactgcagtacaggccatccacataagggtgtattggatatttaggaatatatatgtatatacaaatatatatatgaatgcagtaacaattagtgacaaaaggccgtgaatctaaaggagagcggggagagtttggagggaggaaagcgaagggaggaaccaagcacactctttatgctgtttgtataggctctctctttaattcctcagaggtgcccggcaatggcagccagatatagaatgggcacagcagttcggaggagctatcatgtacccctccaaggaaacagcccactggaagcctcctccttttaatggtgagtgctcagagctgctgtctcaagtcatcaaaaatttttgctgatttttttaagtgctattgacttacccgttttggacaaaaaaggtgataatagcagggatttattagctagagatggaaaggaatgtcggtcgtctccagttgatgtttaattaatttaaatattatgtaattaatgtcagccttttccagattcaatgtatttctatctctttgtggacatcatggttttcctgaaagcattttgaacaaaacctacttaaatacaagcatcttttccctatcaaaactatgtgttctgggactagagagatggctcaagagttaagagcattaaatgctcttgcagaggactcaggttcagttcccagaaaccatatcaggtgccttataaccacctataataactccagttctaaagcatccactggcctcttcaggcagctgtatataggtggtaaacaaacattcatacatacaagctgggtggtggtggtggtggtggtggtggtggtggtaaacaaacattcataaatacaagctgggtggtggtggtggtggtggtggtggcggcggcgccgcctcacacctttaatcccagcacatgggaggcagaggcaggcggatctctgagattgagaccagcctggtctacaagagctagttcactccaaagccacagagaaaccctgtcttgaaaaacaaagcaaaacaacaaaaaaacattcatacatacagacaaaggatttatacacataaaaaaaaaaaatctttagggactggagagatggctcagaggttaagagcaccgactgctcttctaggggtcccgagttcaattcccagcaaccacatggtggctcacaaccatctgtaatgagatctggtgccttcttctggtgtgcagatatacatggaagcagaatgttgtatacataataaataaataaataaataaaatattttaaaaaatctttaaatagaaaatgcacagagagctgccttgtcttcaaaaacaaaacaataatgaaacaaaacccaaccaagagggctggagagatggctcagaggttaagagcaccgactgctcttccaaaggtcctgagttcaattccaagcaaccacatggtggctcacaaccatccgttatgagatctggtaccctcttctgatgtgcagatatatatggaagcagaatgctgtatacataataaataaataaataaaatctttaaaaaaacaaaacaaaacaaacaaacaaacaaaaaaaccccaaccaattagctcttttgttttggttttggtttttgttgttttgtttttcgaaacatggtttctctgtcacagtcctacctctcctggaactagctttgtagacaagactgggctcggaacttaaagagatccacctgcctctgcttcccagttgctaggactaaaggtatatgccaccacttcccggctatttttcatgttttggaacagggtcttgtgctggagatatggctcagtggttaagggcacttgctggtcttggagaggacctgagtttagtttccagcacctacatggcagctcacaaccatctgtaactccagttccagggaatctgatgctctcttttgccctccaagggcaacaggcatgcatgtgttacatacacacacacaatacacatacacataaataaatttttaaaaagaaacagaaaggaagaaagagtgttttgctgtattatccagctggcctcaaaattaaaatctagctgggttatggtggcgcacacctttagttccagaacttgggagacagaggcaggtggatctctgagttcgaggccagcctagtctacagagtgaggatcaggataggctccaaagctgcacagagaaactctgtcttgaaaaacaaacaaaaaaaatttaagatctagccatgagcctcccaagtgctggacttaactcttcctcttcatccttcgattttgatcaatagtaccaagattgtcctttttgtttgtttgtttgtttttttaaagatttatttatttcttatgtacacaacattctgcttccatggggcaccagatctcataatggatagttgtgagctaccatgtggttgctgggaattgaactcaggacctctggaagagcagtcagtgctcttaacctctgagccatctctccagcccctgttttttccttaataatcctgtgttcactgttttttttttttttttttttttttttttttgtcagcttatctgatgcacttgaatctactgataattttaactaccatctgcagccacacagccccccaaagtcagcaccctgctggccactcaggggctgcagtctagagcgatgcagcagtgtaggttttaactaagtttctatttttcaacaaagacttgaaagccagatactggaatgaaaacctgcatgatcagagaagccaagaagcaatctgctgacctgttttggctggagacccagcaagagagtgtctctctccacagatcccagatcaaaaagaccacaaaatctctaaatccctccctactactttctgtgggtctttattcatctccctgggtcctcccttctcacaaaaggctaattcttgccgggcgttggtggcacacgcctttaatcccagcacccggcaggcggatctctgtgagttcgaggccagcctggtctccagagccaggataggctccaaagctacacagagaaaccctgtctcgaaaaaccaaaaaaaaaaaaaaagactaatcttgtcccctggtcactggctccaccctgatccaaggttaataattaaaatccaggcatatgtaaattctgtaccctttaggggcagaatttgtaagtccttcatatgtatagctgttcaccatgtgcgttctttgtgcccaaggaagacagaaaagggcattggaattttctggaattggagttactagttgtgaacagacatgtaggtgctgggaattcatcccaggtcctctggaagagtagccattgctcttaatcactgagctatgtctccaggcctgtaagtcctatgtaaatattattagcattattaataattgatccactaacccccctactgcctcccagatgctagtttctgctacttaagaaatcctgataaagtttcttagatactcacttgcttccaagacttggcctgtattgatgctagagcctgggatgtttcatcgctcaactctatttttaagttttcatgtgtggcaactctttctcctaccagccagctcccaaataacgacatggagacttattaattattaacacttgaccttatttaggtttgtctcattagctcttataacttaaataaacccatttattttaaccaacattctattgtgtggcttgttacctcatttctcctcactgctcatgctgctttctctgtgcctgactggccaccctggccgtcttccccaaatccattctgttcccagaggtcctgcttaacctcttcatgcctagctattggccattcagctcttttgtttttgtttttgtttttcaagacagggtttctctatgtagcattggagcctgtcctggaactctgtagatcaggctgccctcaaactcacagagatccgcttgcctctgcctcctgagtgctaggattaaaggcgtgtgccaccactgtctgctgtggccattcagctcttcattaaaccaatcacagtgacacatcttcacacaatataagggattattctgcaacattcatggtgattttaaataatgacagctaagtcagctacagctaatttgacttctattactacttttcacatgtaattgtttcccaagttgaagtataagtttctttttcttttcattctttttttttttttttttttttctgagataaggtctcaccatgtattcttgattggtctggagctcactatgtgaaccaagctagccctaaactcatagtggtccccttggttacatatcctgagtactaagattatactagccttgcctggctccaaagtgtaggtttcttgagaataaaaaaaaaaacccaaaaaactgtcatttgggggctaatcctcaacacaacaacaaaatatgttctagtgccctggttccatcctgtaatatagttcctggtgtggtggcccccaaccataaaattattttcattactgcttcataactgtaattttgctagttatgaattgtaagtgtctgtgttttccaatgcgcttaagtgacccctcttaagtgacccctgtgaaaggttctttaagctcctaaaggggtcacaacccacatgctgagaaccactgttctagggtctataaaatgaacttcgtgattcttctcattggaaagtttagagcttccttccgttttccccgcttgtgggccattttcctagttatatcggaatgagggtgctgacaaagtgtggaagggcgagccagaaaatatgtagagagaactaattccttgctgtctcttggggatgcccaaaggaatttccatttggctctgaactatttcccacttctcagatgtggacattgtgaaggacaaagtggtctccaatttgaccctgaactttgggccccagcacccagcagcccatggagtcctgagactggtgatggagttgagtggagagatggtgcggaagtgtgaccctcacatcgggctcctgcaccggggcactgagaagctcattgagtacaagacctatctgcaggtgtggaggtgaacaggggcctgttgataggggtggagctatagtctgagctgtagttttgctgtccccaagcttcagggcagaagggtggcatgggttagtctgttgtggaatattattttaagatgtgttatgtttgtttatgttgtggaatatttgtttaatgatgcaaagatgggttgcatttgtttaactctgtgaagcagtgttaattttgcctgcttaaaacatctgattggtctaataaagagctgaactgccaatgactaggcaggagaggaatagatggggctggcaggcagagagaataaacaggggagaaatctgggaaggacgaggaacaagaaaaggaggagaggaggatgtggcagtccaaccagccacacagccagccatggagtaagaaggaaagaaaggtatacagaatagggaaagataaaagctcagaagcaagcccggcattggtggagcacacctttaatctcagaacttggaaggcagagtcaggtggatctctgtgagttccaggccagcctggtctacagagagagttaaacaaaaaaacaaaaaacagaagagtagatgggataaattaagaaaagctggctagaaataagccaaactaaagctaagcattcataagtaagagtaaatctccatgtatttgtttggaagctgggtgacagacgcccaagagcaaatagtaaataacaaacaactacattagttctttgaggttattgttggatggagacttggagcagatgttaaaggatgcaggagtcttttgggttcttccagcatcagtactttattgctggaaccacactcccagcttttttctgtctgattcttggcttgcccttttatcattactttagtgcctcagtttccctcctcttaaatgagtgcgtcaaagctagtgtccctaggggcagagaaagaggaatgagacgtcagctcttcaggattaacagctgattcttgtgttttcccactctttcaaatttgttttcaaaacacttcatgagtcagagtgaccggaggaggtttgtgacagaatttgcagtgtttagaagaactgtgtgacctaaatagttgaagggctgatttgaaggagtcaggtctggaataggattccagttttttgttttgttttgtttttcctgtttggttggttgtttctttttgttttgctttttaattcttactgttatgaagaaagttccctgaacagtggaatcagggcttagacctagccatgtgactaatgtactttctccagggagcctaagcagtgtggcttctgctcagacttttgtgggttaacccctgtagcatcatcctgcgtcacaaatgacatggggaccagaacaggctgtccagtgagaagcattttaactccgccttcttcctggaagctggaactggcttggtaggcagctgggactttgcttcttgacagtctgggggaaagctatgtaaaactgattgcttttctccttccaaatctcagtttcaagggcctaagaggaaaaagacgtagaagtccagggcactctatgaggaaggttacagtgctgaagtcaatttacattggcttgtaagagcctgagtgttaagtttttaagagttttatgacttagttgctgaagttattattagaaattagactatacactttgtgtgtgtgtggtgtgtgtgtgtgtgtgtgtgtgtgtgtacgcttatttgttttcctttgttttggtttttgagatagggtctcactatatagctctggctatcctgaaactcgctatgtagacaagatttttggtctgttttataaagatactggataatgttgtgtcatgtaacatccagttacattttgatagcttaaaattgaccatggtgggattattttcaccatgaaaattgtcacacatgataaatcagggttttaaacattttatgctcgttttaaataagcttgttatgggagctttcattttgctttgctggtactcctgagactctgaagttaagaactgacttctaatacctgaaaggggcaaggtttccagccgcaatcattgcactgctgggcctgttacatgcgatcttcattcttccctttcacaggcccttccatactttgaccggttagactatgtgtccatgatgtgtaatgaacaggcctattctctagccgtggagaagctgctaaacatccagcctcctccccgggcacagtggatccgaggtatgttgcttctttttcttctgccccctgtgagcacagagcgactaagtgcattgaactcagctttgatatttagattccagattccacccacactgatctgcaggatgagtccttggctcctatgtcctttcttaaaaacaaaaaccacacacacgacataaatatttattctgtagattgtgtatgtggatgcgtgtgaaatagcgtgtccaggcatgtgtggggagggcagaggacagcttgggcgtcagctccctgcttctaccacgtggccccagatttgttagcaagcctctgcccactgagccaccttcccatctcacttttccgtctcacagtgctgtttgcagagatcacacggattttgaaccatatcatggctgtgaccacacatgccctggacattggtgctatgactcctttcttttggatgtttgaagaaagagagaaggtatgagagggaggtgtagatagggacagggaaggaagaataagaagtggagacatttgtggggggagggttattttgttggactgtatttgtaggaatcctgtatcatgaggcgtttagctaaccacaagaagtcaggactacggtttgaggacttgggtttccagggactttgtttctaattcccagtgtgttctatctagatgtttgagttctatgagcgggtatctggagcccgaatgcatgctgcttatatccgaccaggaggagtgcaccaggtgagtggctctcctgcctccacacttcctgcccaggcctctttcctctttgaccactggagggcagtatgggctggtggaatagagttctgtccccgtgggaaaggggtacggtaacaagatcaccacttggtttctaggaccttcctcttgggcttctggatgacatttacgagtttactaagaacttttctcttcggattgatgaggtggaggaggtaagatagaaatcagtgggaaaaaaatacctttatcccccaaaagggcttgtggagttttagtacccagggttatgtaagtatagaggctttcttttgaaggttgtcatgaagagaattagcacactggatttctccatccatagatgctgaccaacaataggatctggcgaaataggactgtcgatattggggttataacagcagaagatgcacttaactatggattcaggtaggagcatacagtttctttcctgggggtggtagagagtgcagagagttacagcccagtgtcttggtttcaagcatgtttggtactctcctctccatgccttgagtctgtattccatcaccaaagtgttggggaggagaaggagatgggaagcatgtgtgtcccttgttgtttttgaggagggtgacccttgtgccctttgtacctacagtggagtgatgctccgtggctcaggcatccagtgggacctgcggaagacccagccctacgacgtttatgaccaggttgagtttgatgtccctgttggctctcgaggggactgctacgataggtgagacccaagtccttgcccagctcttgtccttaatggtttctttgctctgtgtccgagtatctgtaggagcctgtgtaatttattaaacttggtaagagttgtgcttagttcgcacagtcctcagtattctcccttcagcacacacaccaaataaaaacactacttactttttacccttatcccgccatcctgccttagatagaactagtttggatgcttttgtagctgaaaaggctgaagcataagttagggattaggctgttagtgattgagattggaatcttcctgacctagcgatcttcccccttgattctaagcttcagatccactcctgtttactgaccttgagtaacatttgcttctgttgttctctttgtttatctttccattcgactcccttactctgtagtccaaactgtgtttaagaggataagacgataggaagggaaagggaaaactacaggccacgttctggagagagagagacagacagacagacagagagagagagagagagagagagagagagagagagagagagagatactgttccaggagaagcaggaacgtttacttaacatctgaggtctcccaaagggcatcattcagacccctgtgtactcactcctgtctgctttctcttgttctaagtgtgtctcatctacttcaggtacctatgtcgtgtggaggagatgcgccaggcccttcgaatcattttacagtgtctgaacaagatgcctcccggggagatcaaggttgatgacgccaaagtgtctcctcctaaacgagcagagatgaaggtgggctgtagggagagggagaaagatcaggcatgggagcaggaccagtggtcacggggaatgtccttggattaaatcctaccttaggtttaacttttaccacactcatcttttattctgtctttactgcttcctgattacatgtggttgttgtcttccaaagggcagagattgttgggggttggggtaagagcctggatctgcctttttttctttctttccttctttttttctttctttctttcttttttttttttttcttcaaggcaggttttctctgtataacagccctggttgtcctagaactcactttgtagaccaggctgccttgagctcacagagatccgcctgactctgtctcctcagtgttgggattaaaggcgtgtcccaccccctggctggatctggtttctatgctcccttttcctctcctcagacttccatggagtcactaattcatcacttcaagctgtatactgagggctaccaagttcctccaggagccacatatactgccattgaagctcctaaggtgaggagagggggaggggaagtgtggagtgggtggctggaggtggacagtgagtggagtgctccctcactagtgacagagatggtaaccagagatgaaccagagaggctttggcagaagagaagaacactctccctactaatggggcattcaactttcttcctccgacagggagagtttggggtatacctggtgtctgatggcagcagccgtccttatcgctgcaagatcaaggctcctggatttgcacacctggtgagatgatctcaatggttctaactgtaatacattaataatttactgactttgaggatttttgtttactttcagctacttagacatttttaactatttttagcttatttatatatgtgtgcatgtgtatatgtatgctacatgagtgcagatatcttccaaggccaaaagagggcatcagatcccctggagctggagttacaggcggttgtgaactacctgttgttggtttcaggagccaatctccggtcctctgcaagagcagtacatgctcttagcagctgagccatctctccagcaccttgctttttgagataggactttgctatacagccctggcttgtctagaactccctacatagttaaggctgaccttgaatttgttgtctcctgctttagtctcccaggcatgaggattacaggtgtacacctccacacccaactcttggatgagattttgtcttgttccatttgttaagacagaattttgctacataactagcctggagctcactatatgtgtgggctattcttggattcacagtgaccctcctgccttagactcccaagtgctagaattacacacttaagctcctgtgcctggcttggatgaggattttggcttggggtttttgtcatcgtggtggtttttttttttttgctttatttttgaggtagggtctcactatgtagctctgactggcctagaattctctatgtataataggctggcttcaaactcataaacaccctcccatgtgctgagcttaaccgttatactaccacaccctgcctttggatgggatttaaagagctcttctctgcaaacttctgttaacatgttgctatccccttccccacaggctggtttggacaagatgtctaagggacacatgttggcagatgttgtagccatcataggtaagagacctattatgcaggggtttgggattctttttgtgaacaaatccatatgctccctttcagtgtaatctgtgtcttggacacagtcatgtgctctggccctctggcgataacacttcatctctaaccttccaggtacccaggatattgtgtttggagaaatagaccgatgaacaaaggcatagcctttgagctcctgtgcctggcagcttcatctgcaaggcctgtccctcataggctatgaggctgtgtgtctccgtgtgtataaacaaacatacatgtacatgctgacttaagctgtacaggctttctgtgcatgtgctagaaaaggagaaattatattaaattagccgccttgcggcccctacgctcaagatcctaatgagtctttcttggtgtctttctgtctttcactttgtatttccctgttccattttcccagctgagtctccacccctctctgactcttgccctttccacttctccattccccatttcccctttcctctcagttcctcctgcccaaaccctcttagcatctatacaaattggtaaactcaagtgagcactgggtgtgtaaagttccagataggaaggtaagggctgtggtggggtctcagggcatctcgggggcagtctgccacttatatacgacctgtgtctgaatgatgggtgaggggttgttaaacatggccggtagaggcagtctttcccaggcgtgaaagtctgttcattctgtgggttaggaggttagttcctgaaagggctgaggcttagaggccagatcttccagctcccctagttggcccttccgggagccgcctggtctgtactgcaggaaggggaaggggccaaagtgtgggggaaggcgtggcaggaaggggggaactgtggtcagggaactgttcgtgggcacagctgcgcagttctgtcagagtgtctgatcgccagttcccagccccgaagcccccgaccaagatgattccagccgtggtcttgctcttgctccttttggtggaacaagcaggtaggtgaaagggtttggtgtggactattagctcttaagcatgaattgggaatggaaggaagaaggctggtgctgggcaggtgggcacagggctgtggcagactctgaagttagccctgttgggtccccaccccactcatcatttccatctttattatccctttcttaccttccatactgtcttcaggaccaatatgaagggttagtttgtcaagggtggggactacagcatgaagagcttgtctaggaaagttcctcctgatcagcaataccatgggatgctctctggggaggtggtctctagctagttatatacaaagccctctagataggctggggcctgtctgtgagtttgggaattcggcaggggagtcaaagtaaacatgaataccttttctggggatgagcggggagatggtggtacacgcctttaatcccagcactcaggaggcagaggcaggtgcatttctatgagttagaggccatcttggtctacagagctagttccaggacaggcttcaaagctacacagagaaaccctgtctcaaaaaaacaaaacaaacaaaaatccctttctggggatggtcagggccacaccactgtcaactgacagcagtaggcaatggtgcagagtcctgcgagtcctgtgttctcaatcatcagctgagaagtaaaagcgaaagccccgagatccagtgatctcgggttctaggctacccaagaactcccctcagcttttgtgtattttgcattctatcaatgtgagatatttgtcttgttttgggtctagcctagaaactccctatttagctgaggctaaccttgatttcctcatactcttgcatctacctcccaagtgctgggcatatgggcctgtacctagaggcaagaaatttggagagcactggttgagagctggcttttacagagggtggggtaaaccctagggaaacagaaagtatggctggaaaggaggagcacaaagcagggacttggaggcagaaaaattggattatttttcctgttgcttaactccggttccgagtgtttctaagcttttccgagtacctgtgtttcatcatctgtaaaatggtgatgttgatgcttctttcacaaggtagttttgagatttatgcaatatcgtgtgggagtgttgtagattaaaaagtaccagtcttggcaacttgacttgtgtggaagaggacagggccacaccatttcattaactggtaaaaggatgggcagcgtagagtgcccactcctagagattcggtgcatcagatgagaaataaaggcaaaaataattaaggtcccagcagcaggctaaggttcaccccattggtcctaataaagctgggagcaatctggagccgatctcgtgtagcagcgcaggctggcatcgttctcacgcttctgactcagcctcatgaaattgtgtggggccatcatgttcagttgctgtgccctttgttgtttgtggagtttcatttcttggttttttttggggggggcattagttgccagttgttttgtttgtttgtgtttcaagacagggtttctctgtgtagccctggtgtcaaacgtcaaacttagagttccaccgattttttatttttatttttattttgacaggatctaactatattctaggctgatctggaactcattatataattcaggctggtctcaagctcatggtagtactcttgcctccgcctcccaagtgctgggattataggcatgacccatcactctcggcttctgtgtgattcttttctttctctctttttttttttttttagttgcacaaacttcccctcttagaggcctagcatgattaacagggcagagtagcaggaggaagaatccatattttagatttaatttgtggtcattcctttgagctgtgctcactatccagctttgtgttgaattaatggtgtctatagagcctcgcaaagtagtcactttgggtttcgtttggttggtttttggtatagttaagtgcctcgtgaggcaaaaagcagtgaggctgagaagatgaccaataatagagtaattgccttctctcccttcaccagctcacatccttcctgtccagccctcagccacaggtcacaggacttacagagacacactcttgtggtttctttgctgaaatttgccactgtgtctctctcccctccccctctgggctgaggtttttgtctcagcccaataaactctgatgggtccttgaggtagaagaagtgttcaatgatgcctgaggaaccacaatactgaaaggagagttctagggctgacagggaagtctctaaccctcagtaaacctaactcctaccacaacagaacccttcatgcttctgtctgactcctgccatagtctggggaaagaggggagagaagagaaaggacagtctaaagatggggttagtttcttcccttagaaggaccctcccgcagcaggtccccatcccacctccccgatccctttcccttcccggtgcacagggcaaccctcccctgccctgtgcaccgggtcccatgggtaccctgtatcccctcagctgccctgggagagccccagctctgctatatcctggacgccatcctgtttttgtatggtattgtccttaccctgctctactgtcgactcaaggtaaggtggggtgaaacggtctaaaaactggacccagaagtgggagggtggcaggaaggggaagcaaaggggttctccatggtttagagggaaggagatgggcctccaacttctctcttactgattgcctttctccctctccagatccaggtccgaaaggcagctatagccagctatgaggtatggagtctctcacaccttcatgcgctcaaccttcctgggttactagccttaggtctgaggcctctaggaaggcaccctgtccctcacctcagggtggctaatactctgctatctagttgagtataaataaaatatctggacaggaaagaagcaagtgacagtacatgagagagttgtatgttgtgctgaaatgtgtttgcagccatatgggtaaataagcaatcatgtgagtgctcctggcttaaagaacctaatgctaaccttgacccagatcttccctgggtgggaaagaagatgacgggaggggagcctgaagaaggtatagatctctaataccttgctccttccatctgtacagaaatcagatgctgtttacacggtgagtaacctcttttacctaccttaggggtcataaagaaaggctgggatttagagtgacctggataggaatggagtctgtgtggtgggtggggcccagtgagaagctcaaactcctgatccgcctttgactctcctccagggcctgagcacccggaaccaagagacatacgagactctgaagcacgagaaaccaccccagtagctttagaactcacgtccttggttgcattctttttctgcttctagttctctcctggccctcgtggttgatgttactatgctacctccatgcttttgatgctagctgaccttactcccataatgacgctggactctaaactaatgtacactggcagttcctcctctccattaaagacttactcacagatgtttattttcttacatattcctgtgcttcattcctcttgctttctctgatccccaacttttgttacaccctgggaagggattaccttctaataaagctgccatagatctgactctactcattttgtcatttatcagatatcggtttagcttgtactaagcattaggctggatactgagtaaggcaaacggagctgctgagaaataggacttcagggctactttgctcttttttttttttttttttttttttttttttttcaaaaccagtttctctatagccctggctgtcctggaactcactctgtagaacaggctggcctcaaactgacagagatccacctgccttgcctgggattaaaggcatgtatcaccattgcctagctactttgctctctccaggtctgaatgctgactgtatctggataagacacttgttctttgggtactctgagatgaaactagatcagggaacattttcacacactctcactctgtgttggggatatggatgtatttgacaacattagaacctaagaaattacttctgtactcagtgtgactttttttttgtctgaaaaatgaatcatgactggtttgtggagaagcctgtatgtctagcccaaaatagtcaccaatctagataatatcaatccagcttatgtgtgttttagttagctggaaagctaagcatacagaaggaatgtaatgacaaggatcatgtgaccctcctagtgggagatttttatgaggacaatgaattttcagggaatttgggagcaagaaggaccttagaacccaatagaggctgaaggtaagaaaggtgaagggaacaagttgggtctaaatgggaagtcatttcccacaagatgggtagtcaaggaatccccttccagtacctgtccttgtcccagagtcactaggaagttcttccagggaatttaagccatgtagtgagcaatgtgtctgatctgcctgccttcttccagaaagggccagtgtgtccaggctcacccctggcaatcccctgtgctggacagcacagcactgcacagtgatttatattttcaaagtgttttcctattgtatcattttatctgctcactaacctgtagaagaaattaggctccttgaaatattaactcatctgcggtcacctcgaaagtagggacactaacttgcttgcctatgtacattgttctacataaaacaagaagggtttttgtttgtttgtttgtttgtttgttttacactggttgttcaaatgctagtgtttgaacctaggatttcccacatgctaggtaaggactctaccattaaactgtatccttagccttttgttttgttttctttttcctttggggatttgtttgtttgctagcttgctttgatttgacacagtctgtctattttgtagctctgttggtcctggaactcctaagtgctgggattaaaggcaggcatgtgccaccacacccagctaaatgagaggttttgagtgaagaaactagagtgcttggggagaaaagagttaacctagccttttgttgtggggtgatggaaacacagtgtccctcagactcaaaagaaaagatgaggtcttgagtcacactgctgggctctctctctctctctctctctctctctctctctctctctctctctctttgttgtttctccagacagcctgtcttggaactcactctgtagaccaggctggtctcgaactcacaaagatccacctacctctgccttccaagtgctgggattaaaggcctgcaacaccactgcccagctgggctctcttaaaaaaacaaaacaacaacaaacccaggatcttttcatagaaagtttatgaagaaattctgaaggttacccttgtttcctatggccccaagtcaagggggtttgtctttaagcccttcattcctttcttagttccattgtccttcattcatgctgcagaatcactcaaggggggcactccttggatttggagacaaatctcaggcatctactctatcgtgtccatcacttatttcttcagtccttttttcacaggtcacaccaaaactctcgtcccctcccccttttagaaacagatgaatctttttcctccctcctactcctcccccactctgctacttctcccagtcacccaaagacacgaggcacagtttgactccttcctcatttattggagaaaacaggcagaagataggagagggactttagggtaggccaatggtcaggagaagggctcgaaggcaaggccggtggggcagctaggataggaagactgctgtctgacgcctcacttagcagcaggagctggtttctcaaggttcataaagttgctcaagaagttcatcagatcagtactagctttcttgaccaggggtgtcagctgctcttgtgtcttttcaaagtaagccctggggaggggagggaccagaggttagttggtggtgaaggtgagagcagactgatccaggttcctggaatatcaaagtctgaaagaggaggaataggtagaccttccatttagcagagggtcagacactagagactggagtccaaggtccacttcctgctgcccccctctgaggaatacactggatctatggggatgagggaggaatttttcttcctaatcttccggaacccgagcccgagttaagattccatgagaactcccaacttcctatctctgaagtcctggaaccccttgagccctctcctaaagacttacttggcttgggtctgaatctccgagctcttggccttctccatcaagtccttgccatagtcagtcatgctctgaaaatactgactgaacaggctttgcagaccgggctcctccgcctgtctgcgaaccaaagcccctacacaaacacataagcaaccatcttttcatttaggttctcagcaataaatccagggctccgtcacactccgaaagatccaccttccccaagttggtgttctgctaggttttttgttttttttttagactttagaaagggaatgatcttcctcttgagttgtggctgacacactcagctttgcaaacacaagagaattggggagccaggaccccccagcattgtctttcctttggtttcctttctccatatcacaaactcaccttccaggctacagatggtgacgagcagtacaaccattgcaagcagcttcatgatggcagtgggaacgtggtctgggcacagggagtggtactgatgggaaaagacactgaaatcaaatgggcattagccgctttcagggatccccgcacctggatgcccgctctaacctaattctttcccgttccacaagaaaagccccatcctttttgcgtgttgcccacatctcgtgctccctcagcgtacctgttcagcgtcgctgtccttggcgtgtactcggggcctgacgggagacaggggctatatatacatctatttccccacccctgtcaggtgatacagagaatggcaagtccagaggggcagagatcatgctggagtaaacaagctggagagatggacgaaagaacaagccaacgggactcctggttttagaatgagaggcagagggtataaactctagtgaagaccaagacctgcttatgatttatttttttgggatcaagggctgaagctgatgggttaatatgtatcagggaatcagaattctaggttatttctctggaaagctctgacatgaagcccttagcccttgttatctttacctcggtatggatagatctcattccccaactctacatcccttcatagcaacttgacagagacgtatttgagaactatggaaagaagctagtgcctttaatcccagcactggggaggcaggcgcagacttatctctgtgaatttgaagccagcctgatctatatagtgagttccacggctgcatagagagaccagtacaaaaaaaaaaaaaaaaatagagaaagaaagaaaagaagcaggaggtggcagggaatgggacttaggggaaaacaagtcagaacaggtacagctgactctgtccttttttgagttaatgtgtaatgagacaggaagaggggcatgggaatgtagaataacactcctgggttctcatcgatgagtatgccctacccccctacccacccaccccccaatcagaaaaatagcctctgccctcctgctcccaactgcgacagtcaagagggttccatccagataaaggtcgaaggtaccctggtcatttgaccaccttatcagttaggtcgcggcccttggcccagctctaactgtgcgggagggcagaggcacattccctagacaggaatcagctaagcagattccgaaaacatgcctacctttcacccttttgaccccaacgcttaccctgtgtgccctggaacactactgagagacatgggatggaagtatgggagctagtcggggagggcgcagacaaaaccaggacatcttgcccattttcagttctcttgtgaagcagctctacctcctggccctggccccggggaaagagtgcaagtacagtctgcagtcgtcttcctggatttcattagttctttctgcaaggaaggactaactcgagagggcagctgcttcaggaattagttctgcccataacccgctcccctctcacaaactcacagccattcctattctaacaaaaaaggcaaggcgtgtagaagaactccagagggcgaggtagtggtggtggggttttgttttctaggggagagctgtgtctgtgagctgcagtcctttggaggtgtgtggtggggggctgtggggattcctcagaggccttcagcaaggtggggagttatgtgaattagtgtcttcacaatccctgagaggctcttcataaaacacgtctgcaaactcaaactctagtttcacttttctcacgtccggtttaaggagctccagtggtccaggcgacagaatgctccctctagtgtcatgaatgctcacaagtttatctcgaccttgaagaggctgggcgatcttagcaatgtagccttcgactcaagtctgaagtgccacccacaaactccccgctgcagcgccggactgaagctccggggccgtcaggcctgccactcttctgttttcttccctctcattggtcactgggaaattgaagccccttttttcatcattgagtgggttgggtctttgagcgcttcctttgcccatttccaagatggcgccttatagccatgcttggaatgcaggttgaagctatagttctgccattactcaagatggctgcccccatcaagatgaccggggtgtgcctaggggaaaggggcagcaggatggtttgagatggtaagggctagtgctccatttcggacagagccttgggacgtgggaatgaagaacagagaaactagggagctagctgaagcctgtggtggtggttaagaatagataatgggagagcggacaggggtgacaggtgggggtgagggatcaacgatggggcgggagtgtgcctggaattcaattttcccatcggtgctctctccccctactgttccttgttgcaggtctagcactgaaccatatggaagtttgtgaaactggggagcctgatgatggggggtggagcccgtgggggatagagggagcagtagattgtttccccaggctaaccccgacccctccctgtccgctggactaaaatggggaacaccctgggcctggcaccgatggggactttatcccgccggagcccccgtcgagaggaaccgctgcccaaccccgggagcttcgacgagctgcaccgattgtgtaaaggtgagcattggcatttgggtgtctcaggttgaagggctagaggaggggagggccttggatgctgatgtccagtgatgtgaacagaaaggagagatccagctggagcatccagcagtcaagaaggatcagatgcccaaagtagagcattttgttgcaggatttgaaaggaggtcatttccttcattgctttcctatgggactaaacgggaagtctgtctccttggttggggtccttgtctgtacttattccttcccttccctctttcagatgtatttccagcacagatggagggcgtgaagctggttgtcaacaaggttctgagcagccatttccaggtgctcccacttctctggcccctccctgcctgtccccagctcctcttcctcacaccctttactccagtcttagccaggactttgcctgtgggacttgttgcttaaaatccagcgaccctctgcatatgttggaatagttgaggtttttaaaagcacccgggtgggggaaagaccaagggcggggtaaggaattgaagtgcagtggaatgttatgttctctatcgtctcctctttcttcaggtggctcatactgtgcacatgagtgccctgggcttgccaggctatcacctccatgccgcctatgccggggactggcagcttagccccactgaggtgagggctccaccacacttgtgtcaactccctagaccctgcatggacgtgggtcttgagaaggaggaaatgtggatgttttcaggaaggtcattcagcaactatgttctctgtgcctcttctgaatgggagagggtagagagatattcctgtgcgcagaggccagcgtttgtctttgatgtccgccagggggcgctgtgtgatgttcctgaaatcccttagtgttcgtgtttaggtaaatacacctacccatctcagccttactgtctacactccttaacaggtgttccccactgtggtgggggatatggacagcagtggcagtctcaacgcccaggtcttgcttctgttggcagagcgtctgcgagctaaggctatcttccaggtgacccacagttcctgcctccctccactgaggcactcctctctctcttccatgggtatcctgccttgggggacccagggggaggggcagaggcaatattgaacataaacagagggaagggtattttatttcttactctcctcaccagacacagcaggccaagttcctgacatggcagtttgatggcgaatatcggggagatgactacacagccactctgaccctgggaaatcctgacctgattggggaatcaggtggggaactgggacagagttcttgcctgtccatttgcaaaaaaaaaaaagaaaagaaaagtcaatcatgctgtttcatcttcattgcagtttggggattagaaaaggaactttctgggcaggtttagagcgggaatgactggatataaatctgactcttgtctcctcactcccccacagtgatcatggttgctcacttcctgcagagtgtcactcatcggctggtgctaggaggagagctagtttatcaccgtcgaccaggagaagagggggccatcttgactctggctgggaagtactcaggtatggtgtcaagtgacacagtggtgaggaggagtgactctgggcttttctgggggtccctgccggtatctcctacagtaactgtcttttccctctgttctttttctcctagctctacactgggtagctacgttgaatgttgggtcaggtggggcccatgcaagttattaccacagggcaaatgaacaggtgagattaccgagctgacccactatcctattaagtcagtcagaaacttctgcccctcaagtctccccaggctcctggcctgttattcttcctcccctccccttggtgtacattttcacacatgtttttcggcttgctgataccctgtcaggactctgctggcattcatggtgactgttcgtcttctcatttttgtccctgcttctcaggttcaggttggagtggagtttgaagccaacacaaggctacaagatacaaccttctcctttggttaccacctgactctgccccaggccaatatggtgtttagaggtgagggttattgtgacatttggaagtactgagagtttggggatgtgggggtggaggctctaccttacttctgtttaccccaagccctacttacccccagtattcttttccctggcaggcttggtggatagtaactggtgtgtaggtgctgtgttggagaagaagatgcctcccctgcctgtaactctagccctgggagcctttctcaatcactggcgcaacagattccattgtggcttcagcatcactgtgggctgaagttgtcctggaggcaacttccacagcagctggaacctttgagtcagatgtcctagggccagagactacctaggttcgtctccaaagcctaccttgctgatgacttctaggtcccatgggcagagtaaggggataggaccgtgtcctcctcagagctggagcttgccacacgatcactttccaatgaggcagtggtttgaggttcccaattctgccatcacccccactgtaattttccacaagctctgtggctctggactgaaggagaagggtcaaggatgtatctggctcctctcaccctactttcttctttattgtttttatttgatgaaggaattagcttcttcagagcagaaaaatctgcatgggattcgctccctgtcccatttctcccagtttttaatccctcagccccccaaggttgggaaagtagggttaaaaagctaaatctttggccatagaaagaccaaagaatgggcccacccattcccagaaggaacttgaccttctagccccgaggcttcctcctttcccatcttctgtgtttccagagaacaactttgtccttatggttagcccaagtccccactctcttcccattgccctctccactccccatcgatgacggcacgaagagacagttactgttcagtgtttcattgctgtcactgagctcctttcagctggtccccatcttggataccagcagtttcccctttccagtccaatgaatcccaggggtctggggaaggaggcaagcctgggcctcagctgcagatttcccccagcagtggcatcatagcggacagtccctggatgcgctgtacttcgtatgagtatgcattgtttatgctccggagctcagccagcaggcccatcagctttgcatacagaaacctttggagggagtagtagggttaccagggaaagaagagggaagtaaagcagctgggagtcttgtcctgaagcccctgaactgtcccttaaggaggctaagtctgaacattagaaaatcatgctgtggacggcacatactatactttgaaaaatttcagaagtccctaagagggcctctatcaacaccgtcttccttccttgtgcctagtttttcctgaacccagggcttagaggtcaagtgtaaaggaagtgctagacatggccaaaacttcaactgtatagaacctggaggtagaaccttccagaaggaacctctggaaggtgggtgtgtcttctatgtatgaagcatccccctcttagcaaactgatttatcaagggatgagtaggacaaaaagtgtcatgaacttcagagcctggactgttgaagtagggacagactttgtccacaaaactgtgaatgaccgtgacttcaaagggaactgaaaaattcaaggaattgacccaagggagaggtagagagcccaaaagaagaatgagcaagactttgaaaattttgctttagtttggaaaggttggagaggtgaggtgacggatatcaccaatctcaggaatgctatcacacataggctatgagctactactttgcatctctactgaataaaacaaacaaaaaaacttggaaaagtgaaatggaacagcattatgagcaatttggatattggaactatgtgtgataggggtggcccaagggaaggtctagattcctaagtatttggtttcccaaaggaaacaacagtaaactgcattcatccatattccggtgtttctccaattcccttccgtcccccaatgagcacccagcgtcctacctaccgactttggggccttggctgctgttccataatgtagttgttcaaaatcagtgccatctcctcttgcagctggtcaatctcttctctctgggtgactccaggcctgtctgggatggaaaccaggaaggacaaggtagcaggggacacgggtgggaagtgtcacattgtacaggggctgagaatgctatagacccactctgtgggcttggaagctagatggtcaggggtagattaaaggggccaagagttttggtagaggtggcagagccagaatgctttggcttttggatgactctcaccaggagagaagagggccatggcagccatgagcacgtactcaggctgttggagctgcagtcgtttcaatgtccaatggaagcgaaagatcaactccaaatattcgtactggaaccctactgtgagagacggtaggtttgggagcctcctggtcatcgctccataccctgtaccacaaggatacataccctgtgctgtcctaccatctcaccgtgggctgcatcttcaaatttgtagcaaagtggcccacagaagaaattctgtgtttgaagacagaaagtagtgttgagtgagatatgcaatatttccacagctgctcccttgagaagggagatctggtcctccatgggaagggacctgtggggggcagaaaacaagggtgctttagacttaagtctgcgcatctaaactcctaaatgacacattagggctgcaaatgttaggcctagtgctcagaaaggctaagggataagtgactttaaccagagactggcatgatttatgaagcatttacttcctgaaagaccacgtgatactcaccggaaaaggggaagttccttggtgaacttgataatctgctgcaccatgaaagtggtgatatctgcaaagtgtgtgagcagaggcaatgcagggaccagcaagaaggagggccggtgattggtgaacaggtaagccggaggctgtagagttggttcagagtgtgagtgacaggcctcagccttggctgtcctttgggcctcaccagccttagaaggggttttggctggttacctgcccactctggagttctggagacctgttttctgtcagggcatggtacatagccctctcccccaggcacccagaccaaatctctaagttctcaccctgaacttcacaaactggtcaaacatggggcccacgtggcgaatgtgggcccctacgagggtctggaccagctctttccgctcctgactcagctgcagggaagctttttgtgcccgccgctgtgcctgcctggctcgccgcaatgccagggcttctgctgacagtatcactgtgtcgggcaagagagacgacaaagccattgagagcagcagagaacacctttctgccactccacgagtcggggctactcaatctcttatatgaggaaggactgagggagaaaggaaagtttctgagtcttcattggatgtcactgaactagtgtctccaggtggcaggggatctctgcactctctaccagcttaatatccatctgtgacacactgcagcagaaaacagtgcaccatgggaaagaagggaagagtgcagagggaagtgggaagggcataagacttttggctccttgggaatattgaagaagggtcataatattgaaaatgtcacttcatatttgcatagcattgtaatttctctatggttaggtttcaccagatacagcaactctaacttagacagggcagacgtcatatttttcagaaacagactccaataaccctttcacagtcataagtgatacaggcagaactcaaatcagcctcatttggcttctacagagtccttttcactgctccatgttgaaaagcagtgggagccaggctgtggtggtgcatgcttttaatcccagcacttgggaggcagaggccagcctggtctacagaggaaaggctccaaagctacagagaagccccctcttgaaaaaaaagaaaaagaaaaaaaaaaaaagaaagcaaagtagtgtgatagggaaaagcaggagtctgagaggcagacaggcttgatgctgaagtgtagctctgctttttagctgactgactgaagttgtgggggggcagtttcattatctgttggggccacagcacagttacctggcacagagaaagcagcaacgaataactaagaagtacccgggagatgacaggtacgatgtactccagagatagaaggggcaaggcaagccatgtatatggaggtgagggcatttcaggtagagggaatgggaaatgggaaaaaggaaagaggaaggaatggccgcggaggaataggcttactaagttcaaggatagcactgagccagtgtggctgggatgcattaaagggcttaagagacacagtctgaagtggggtgtgtatggaattatgcaccttaacagagattggagtggggagaggctgggaaatggttcaagatcaaggactggttgatcttacagagaacctgggttcaattccagcgcccacatggcagcttataagctatctgtaactccaattccaggggatccagcatgctcttctagcctctgtggacaccaggcatctacacagtgcacagacatatatgcaggtaaacacttaaacacattaaaaatgagtaataaatatttttaaaaagagagacttgaagttttggaaacagtagcataatctgatcagtgtcaaaaagcttactctgcctgctgtgtggaacatgagctgttaggtggacaaaacagcagagaagcacactcaatggattcctgggatggtaggggcccaactcactgtctttcctcatgccagcgtttagacacttctgcaacctgcaggctggacagtggcgtctctgggttttgctgacctcacagcttccagaaaatggacagatgggaccaacggttttgctgacggttcgcctgtgagacagagaaagacgcggcagcatttgagatggaagtgaatagctaggtgggtataagaggaggctgagggatatggcctaaaagactaaatgattcaacaataggctaatttgagttgtacccagaggtcttcagagatagctggaacattttcatagggactcaggagccttcattgtgtagtaccaacttggtactttgcaggtagggtgtactaaacaagtgctcttaactaataggctgtgcctctaggacaaacggttggcctgctcttttattatgtcacagtgtgatggtcagcaagattgagtgtgctagacacagggtagtttagcttagctgtgggagtatcatagccggataaagcttggagatgtgccagggtttcaaggcgggctgataggagtgtgggggttgttcctgttggagagaaagcattcacctgaagaagcctttgcagccctcacaagtcagggcatggaaatgatagcctgtggctcggtctccacacaccacacaattccttggcccaaattcctctctgctggccatggtttcaagtgttagtgtagctgtcatggtctcctgaatgtgggaagagttaacagtcagctctagaccatgttaaactcttcttctgtggaatcccttcccgcaactacccccgccccctccaatccccagcactgtctacactaaaagcaaaactgttgttttcagcctctgacttccaacagattacccacctgtttttcctaggcagtatgacacatgcaggccacaaaatcttgtgtgagatgcctctctccaagcctcacactgaccccactttccttgtgatctcaggaactgcaggaattagagattgtcctcggtacctagaaaatcaagggacttgtttctgaatctcttgtatgtgccctccaggtactctctgtgccatttgtaggtaggatgcagactgtggacccagggcaaagacctggggcgggaggttttcctagcatgccccagttgttggttggtggcagatggggagggactatggtaggtggggacttcacaactcattaaaagttgtcacttatcaggctcaaggagtttttctctgttggtgagctttaggctaaatctgcagttccctctatatgtgggtcctggataaactgaggagagctaaagagggagagagggcaagttttttttacatggagtatgccaatagtaaaaggatagctataacaattatagcaggctcccaaaggattttctttctttctttttctttttctcttcgtgttttgtttttccagacagggtttctccctctgggtgtagccctggctgtccgggaacttactctgtagaccaagctggccttgaactcacagaaatccacctgcctctgtctccccagtgctaggattaaaggcgtgcgctaccaactgcctggctctttcttttcttaaaacattattgattttttccttttaatgtgtatacctagtacccacagagatcgaaggtagagatgcctgatcttctgggaccagagatacagcctattgtgagctaccatgttccttctgtactaggaattgaacctgaatcctttgtaagagcataagtgctcttaccctctgagccttctttctagccccagaaaattgtttaaaaaagacttcaggagactaagaacttaggcataaagccagaagagatcccatttccttacttgggatgactgagatataaataaaagtgaactctaggtggtagagcaaaagctcagccagtgaagtgcttaactgtatgagcataggaacctgcgtttaaatcctagaacccaccttgtttaaagatttattttctgttttgtgtgcattggtgtttttgcctatatgcatgtctgtgtgagggtgccagatcccttggaactggagttacacagacaatattaagatgccatgtggttgctggaaattaaacctcagtcctctggaagagcagccagtgctcttttttcttttcttttctttctttcttttttcttttcttttcttttttttggcttttcgagacagggtttctccgtattgctttggaggttgtcctgtaactcgatctgtagatgaggcctggccagccagtgctcttttttcttttctttctttcttttttcttttcttttctttttcttggtttttcaagatagggtttggagcctatcctggcactccctctggagaccaggctggcctcgaactcacagagatcctcctgcctttgcctcccaagtgctgggattaaaggcgtgtgccgtgtgccaccaatgccagccccatttttttttttaaaagcacagtgggtgtgaagatgtgtcattgtgattggtttaaaaaaaaaaagataaatagctaatagctaggtgagaggtagaggtgggatttctggacagagagagagctctgggaaaaaggaaggtagagatgccaggagatacagagcaagcaggacgtacaggaggagaggtaagagccacagtcatgtggcagaacacagactaatataaatgggttaatttaagttagaagagttggttaggaacaagcctaagctataggctgatctttcataattaatgattagtcttcgtgtcattatttgggagctggtgggacagagaaacactgattacagtgggacacacttgtaatcccaatgcttatgaggcagagacaggcagatccctggggcaagcctagcctagttggcgaattccagaccagtgagacattgtctcaaaaaacaaggtggggctggtgtaatgactcagtgggtaaagacacttgctgccaagcctgatgacctctttgatacccagaatctacatggtggaaggagagaattggcacctgcaagttgtcctctgacctctataaatgctcagtggtatatgtgcacccttcccaaataaagggatgtaacaacaacaacaaagccctcacaaacaaaatgggtggcacctgagaaatgaatgatacccaagatggtcctctggtcttcacatgcgcacacgcgcgtgtgcgagagcacacacacacacacacacacacacacacacacacacacacacacacaacctctaataaattagaggcagttgaacttgatttgggaactcttatcctataagagctgagttcatggattgtgatttgtgattggagggaccagctccccgttttggcagccataacagccgaacatgtacttgcctgaccttgccttggtcactgggaggtcagatgcctgcctcatggcaaggaaccaatcagaagttagctggtggtgctatgctttacagctctggtgtgctttacggacaagtgcacagcaatgatgcacagagcatagcaaccaccctgggagggcctatgggccataacaaccagttggccaatcaacacagggtaaaccctccaagcctggaggcacaccaatcctgagcctcagggtacccctagacactccccttatgctgccctataagatctctatgcaaactctttgagctgtctttcctaggcatctgccatggtgggtggatgaaagacccgagctaacatggggttagctcgttagacaactataataaagcctcatgcagtttgcatcaagctttcgactctgcctggtgattggggtgactgcggtcttgggctgagatcctggaggcccgagcttccgggtatctttcatgatcacaaaggacctggcaatcagaggattctcatgcttgtcagttttgctgctgtcatgctgatatttatttatttatttagtttgctttttcaagatagggtttctctgtgtagacttggctgttctggaactctctctgtagaccaggttggactttaactcagagatccacctgtctctgcctcctgactgctgggattaaaggaatgtaccactaccagccagctcaaggtgaaagacccctggaggctcaggccccccaggatctcagcccaggacctcggttaccccaaacaccaggcagagttgaaatcatgatgcaaactgcacgaggctttattgtagttgtttaacgagctaatcccatgttagctggggcctttcatccacccaccgtggccgatggctagaaaagatggctcgaagccactgtatagagatcttatagggcagcgtaaggggagtgtctaggggtacccacaggctcaggattggtgtgcctccaggcttggagggtttgccctgtgttgattggtcaactggttgttatggcccataggccctcccagggtggttgctatgctctgcgcatcattgctgtgcacttgtctgtaaagcacacccagagctgtaaagcatagcaccaccagctaacttctaataggttccttgccacgaggcaggcatctgacctcctagtgaccaagacaaggtcaggcaagcaagtgttcggctgttatggctgccaaaatggggagctggtcccttcaaaggaaactcttataaaagaaagcatttaattggtgcttgcttacagtttcagaagtttagtccatttttatcgtggcagcatggtggcatgctggcagacatgttgcttgagaaatagctgggaattctacatcctgatctcgggcagtacgaaagcagagagcaacactgggattgccttgggcttttgaaaccttaaagcccacctgagttgtagcaggctttcttggaccaccagcccctaaatcatgacacagagacttattattaattatcagtgcttaggcctagcttaagcttgtttctatctagccttttaaacttaagtaaacccatttctaatatctatgtgctgccccgaggctcatttacctcatctatgtcctacgctccatcctgttttcctgcttcctctagtttcctcacatttccacccttcttcttcccagtgtcctctgtgcctggaaatcctgcctagctattggccattcagctttttattaaaccaatcagagtgatacatattcacagtgtacaaagacattattccacaacagtatttattttctgtgtatgtgtgtgccagagtgttcatgtgtgtaccacatgtatgcatgcatccatgaacttcagaagatggtgtagtaattatttctgttaacaaatactgactgaagctgggcagtggtggcgcatgcctttaatcccagcacttgggaggcagaggcaggaggatctctgtgagtttgaggccagtctggtctacagaatgagttccagcagagtcagtgctgttatacagagaaaccctgtcttgaaaaccccaaaaaaccaaccaaacaaaaactacaacaataacaaatactaagaccctccatgtattagatatatgatgaaaagatgagtaagacactcttgtattcatgaggtttaaacctattagggagacagcccttctaacagatataaagaaatatattcagacccatgattatgctgaattcagaggattatgtgaccaaaagaggggcccttaatcctggtttgacagagtaatgttgttttctatctccttggacgtgtggcaactgaattgatttttttaaaggacaatgaagagccgggcgttggtggcgcacgccttcaatcccagcactcaggaggcagaggcaggcggatctctgtgagttcgagaccagcctggtctacaagagctagttccaggacagcttccaaagccacagagaaaccctgtctcgaaaaacaaaacaaaacaaacaaacaaacaaaaaacaaaacaaaaaaaaaacaaaaaaagacaatgaagaattagctaggagaaaataaaaacaaatctaagcagaaaatgcaactgagatgttcaagaagccagaaacatgaaggcagatatggtagagccatgaacaggcttgctgaagcataggactttgatgaaagggaagaatggacacggggctagagagaagcgatatgaagctgagatttggcagggccagactggggacatctcatgtatcagaccaagcagtttgaatccattgggaagctttaattatttattctttcacaaatcaggtctcagctcttgctatgcagcccaggttggaattcttgcaattttgctccctcagcttccccagtgcttgggttacaggagtaacccagctagtttttcagagaacttgaggtggtaagcttgagactggagagtgctcatattaaaggtgcttgcagccaggcctgatgaccagagttcaatcggagggactctcatgacagaaggagggaaccaacttctactagttgtcctctgacttctattcatgtcctgtggtaaacatgcataaacacaaataaaccaatataagaaaaactaaagagtgagctgggaaagatatggtcagatctgtattctggatagctcactttggtggttggttgacaggtaaatgtgtggatggagacctggaagcagagactagcaagctattgtcataacacagatggttaagcctactctagaatagtggtaagacttttaagaagagggtgtgtcaaaaaatacataggaagtgaaatcactggattgaaaaaggggaagagaagttaatgatgactgtggttgtctagcatggctgatcgggggcaaagaggccactggagaaggactaatgccctccacttggtccctgatcctcttctacagtgacaatgcatttcagcaacattctatcgagtgcttgttccgtgggtagacaccatgatgaggaggaatgagagagagagaggtcctattacaaagcaatttaattatggagctgttctagcttctttctgttgctgtgataagatatcctggcaaaaaaagcagtataagggaggaaaagatttatttaactcacaactccaggttacaattcatcatttcagggaagacaaagcaggaactccagcaactggtcatctcacatccaccctggcttcccctaatgataggctgtaaagtgtaagctgaagcaaaaccctttctcctcaatttcttttttaaaacacagcaatagtatgaatccctaagagcctaccagtcaggagtcccagcacttggtaggcagaggcaggtggatctctgtgagttcaaggccagtctggtctacatagtgagtcccaggacatccagggctacacagtgagaccctgccccaaaacaacaacaaaaacaaaccaaccctgtagttggaatttttgttgtgctgccaaccagcttccaagtaaagatacagagacttattaattatgaatgctgaaccttagcttaggcctgtcccactagttcttttaacttaaattaacatgcttttattcatctatgttttgccttggcctttttatctttcattctgtatattctactttcctgcttcctccatgtctgtctgtctggcccctattatctccttgtcatctcctttttctttcttccttgagcctaaattcctcatcctacttactctccttgcccacaagtcccggctatacctcctcccttgcttttggccattcagctttttattagaccaatcaggtgccgtagacaggcaaggtgaaacagcaacgcatctttacttaactaagcaaatgcaacacatctttacatagttaaacaaatgcaacacatctttgcatagctaaccaaatatcctgcaacaaaaccctaagaacttaagttcaagttctgacctcttactagctgaattagtggttttggccttttattgcttaacacacttaagacccagttcaatgggccctgagaagcagaaattgtcatcttgacttccctgtagaattggaaaagaagacttctaggttggcacctgtggtgatttgaacggtatggcccccacagactcatatatttaaatgagtggtcgttagggagtagcactacttgagacgggttaaggaggtatgactttgtggaagtaggtgaggctttgttggaggaagtgtgtcactggtgggggtgggctttggaatttcaaaagctcaagccaggcccagtgtctctctctcccttctgtcttcagatccggatgtagaactctcaactacttctcaagcaccatgcctgcctgcacaccaccatgctttccaatatgttgataatggactaaactgtagctggtctttctttggactgccagctcccgaataaaaacatggagacttctaattaactatgaaagcttggccttaacttaggcttgttcctaaccatctcttaaaacttaaatttgcttgtttatattaatctatgttcttccaagtggctcattaactatccacagtaccatacataaaacttcctctgtgtctggctggcaaatctcctgccttagattcttttttcttttcttttctttctttccttttttttttttttttttttttttttttgagacagagtttctctgtgtaatggtcctggctgtcctggaactcactttgtagaccaaggtggtctcaaactcactgagatccacctgcctctgcctcctgagtgctggtatcaaaggcatgcaacaccacagcctggtgtctgccttagaatcttttctagagtttctctctctgcctggaagtcctgcctattctgttattggtcattcagctctgtaatccaatgagaaggtgccttaaggcaggtgaggaaggacagagacacatcttcacacaatgtacaaaaaggttatcccaacactaaacctctgagactataagccagctccagttaaatgccttcctttataggagttgctgaggcatggtgtctcagtgactaagacggcataaggtgcttatggagagggcaggaagaggtcagatggagggaaaatgtttgatcctggggctgttcgttcactggggtctaggaattatactgagccttgctcttagtccaccttgtacttctgttgttgctgctgctgctgctgttgtttgggacagggtctcatgtagcctcagcttatttggaatttgttatgtctccgacccaggcactaaactccctatcctcctgcctctgcctcctgtgtgctgagcttatagacatgtagtaccacacatagaaaatcttgtacttctttgagacagggctgctttggaaacagacttctctgagcttacttttctgaatttctccagccttggagcctcttctgtggagcagatcaagagtggaatctcctgcatgggtcactggcaccctcgaaaggtaggccttcagttaagtgacgtgctcaccctccccctacacacccacctcaggccaggatctgaaaaacacctgtgccggctgaaacctgagtggtaagctttctgaattcttattccttttacctggggttggggaactaccagacaactttattgtaaagaataaagcaatatataaaattctttgcacagcgcttaaagcatgggaggggtctataagtattcagacccttagcgtcttcctttttcgctcttccatgcccgctttccctctcccagacactaagttggagcatggagtcacctggcctcttttctctccctaaaattgaccagatgtcatgatttgccattgctgtcccctgacctctaaatgcccactgcttcttagccgagttcaggcctcatcatttttcactcaccactgcagtagcctactaaattattctcgatgccgtcagcgtcatctcctaacccatcctccgtggttgctatttctaaaatgcaaatttgatcctgtctctcccctgcttaaaattcttcatttgatttccctcaccttcagagggaaaaaaaaatccaatctctttagcatacaacacaaagtcctttgtgatctggctcctacttatcaccctggccacttctattctgtcctggcttccctgccctgacctcgtacatcacacttggctctagacgtacttaaacatttagcgtgccctgaacaggctgtgctcacttccctctgacatcgcccttgttgtttcattcggatggaatcacctcacataccccaccccaccccatcccacccctgccacttttagtccctcctcccttggtcctcctagcccttcagcctggagtacagcacatcacctttaggagccaatgctatatctgcacacaaatttgtcacagcactatctgaagaaccatggaaggcttctggctatcaatcaattccaaattgctggattaaagaactgctttcttttcctctgggagacagggcttctctgtataacagccctggctgtcctggaactcagctctgtagatgaggctggccttgaactcatagagatctgcctccctctgcctcccaagtgccgggattaaagacgggccaccactgcctggcaagaactgctttttaaaatagagctttaaaaaccattttcttaaaaaaattatcatttattgtatgcgtgtgtgagagcatgtgtaggagggcagaaaggtatcagatcccctggagctggaggtgtgagctgcttgatgtgggtgatgggattcaaaatcgggtcctcttcaagaatagtgtgtgctcttaaccactgggctagctctccagcccaaggattgccttttatgtttcctttctttctttttcaagttttattttatgtgttttgcctacacacatgtgtgtataacacttatgtgcctgatcccaggtctttgggaaaagcagcagtgctgttaactactgagtcatctctctagccccctttacttttctttttgagatttatgactacatagcccaactcagcctcctgagtaaagaatgtggtcacaggcatccatgaaacaccacaccagactaaagtctgcatcttttatttcttgattcacagaggcttttagttgtggtttttggtgttttgagacagtgtcttgctttgtagccctggctgacctcaaactgatggtaatcttcttgcttcagcctcccaaatgctaggattacaagcatgaaccaggtagtggcacatgcctttaatctccacacttaggagacagaggcaggtgaatctctgtgagttcaaggacagccaggtacacagtgagttccaggacagccaggactattacacagagaaaccctgtattgaaaagcaaaaaacaaaacaaacaaacaaaaaagaaaaagtaaaacaaacaaaaccaaaatcaagcatgaaccataccacctgggtgtgacatacagagtcttaagtactcaggcacatataaatgtttatgggctgaaaaattgactaagatatgaattaaagtttgattccaggggaagaagagacgactcagtggttaagagcacttgttacccttgcagaggacctaggttcgattcctagcacctacactttgccttacaaccatctgtaactccagttccagaggatccaatgcctcctttctgacatcaaagggtaccaggcaacacacatggtacatatacccagatgaaggaaaaacactggtacatataaaataaaatatagtctcattctaagcttacactctttccatgtgaaattatttatgcaattatttgttattcaccattcaggatgtattgagggaattcacttattctttcaataagtgtttaatggatatcttgtctgtgtggggcattttgctacactatgtcccaacctgttatctggaatcattcctgttttccttttagccgctgtctttcagatctgattatcctttgttgttccgactctctggccagatgcctattactctctcatattgattcccaactcctctctgacttctgaactgttgctacacactgttcctaccctccgtgtttgcatttgatattggctgaccttactcaggtgtccctggagccaactttccagtctgggcctgctctactgtgtttgacctcccaggtactgggacaaacactctgaacaggaagggcttctttcatttgagtcgtataatctgattttaatctttttttctcccaattcaccagtgatctctagaattcagtggtctagaattcagtgggctttttctccatcaatatctactgcttttgaacctctgataaccacattgccttctgtgacgcttttgttctctctatggtattattctttcttcattgtcccccgccccccccccccccagtgctggggactaaaccatcagagaagtaccctgccactgagccacacctccatccctgtcctgcctccctattttttttttttttttaatgtatagtgttctgtctgcatgtacccctgcaggccagcagagggcaccagttctcattgcagatggttgtgagccatcatgtggttgctgggaactgaactcaggacctctggaagagcagacagtgctcttagccactgagccagtgtctccagcccctccctatgttctgactgctctgttctcttcctccttcaatgatgtttcttttcctaagactctgggagcagctgtaagtcttctccactcgggctcagtgtcaacggcgctgtctttcatcttctatgctcctccctaacaattcatctactcacaagggactggtaagaagcgaaaatattgaacagcttaacatagccgtttgcaaagtacctttacatgctttatttacttatcctcatcttagcaagtgaagatcccaaaacctatgactagttcctcagaatcttgttatttatttgtttgcttgtttttgagacaggttctcactatgtatccttggctggcctggagattgatacgtagaccaagttggtcttgaacttgattggtctgagactctgctgtcctcagcttcctgagactggaattaaaggtatgcaatgcaacacttggctttttttttaaaaaaaaaattgctattcttgccagcatctgggaggcagaggctggtgggtttctatgaatgatatgcctgcctggtctgagttccaggacagcctacacagagagcctcgacctcaaagatcaaaacaaaaatcaacaacaaaatttgcttattcttaatagtcatttctgtgatttctcaccttaaatctgcccccccccttcaatctttggagtcaaggtcttactttttagccctgcctggccttgaactcttagagatttgcctacctgtgactcctaaatgctggggtcaaaggccagtgcctgaaccaccacgcccaacaatttcaattactttattacttttatggagctccacacttctaccacagcacttataaacacatgccttctgttgcatgctagtatctttcctattagactataaagtctagtattgcatgaggatttttgttttttagaaaggatatcttcctcctctccattgctgtaactacaggcatgtacccattcttggcttgttgtctgtttcttttttttaaaagattttatttattaagtatatagaagagggcaccagatctcattacagatggttatgagccatcatatggttgctgggaattgaacacaggacctctggaagagcaaaccagtgctcttaatttctgagccatctcttcagccccctgttgtctgtttctttttttcttttctttttttaaaagttatttattacatatacagagttctgtctgcatgtatacctgtgggtcagaagagggcaccagatctcattacagatggttgtgagccatcgtatggttgctgggaattgaactcaggcattctagacccagtgttcttaaccactgagccatctctccagccctgttgtctgtttctttcttttttttttcttttttttagttgtctgttccttaatgctgttcttttttcttcttactgtcacctgggctcctatagtttgtacagcaaggcctatcatgaccttcttgttgttagtgttcttcttgtaaaaccaattctgttccctttgtaaaaagtaatctagaaatgctatttgtttatttatttgatttattattgtagtgtgtgtgatgggaggaactcatgtgtggaggtcagaggacaaccttgtggggtcatttctctccttccacctttatgtaggttttaggcttatgtcatgtcatcagcctgacatgagtatatggcaagtattttttgtggcgtatgttatctggcaagtacttttaacttctgagcaattttctcagccatagcaatgctatttgtgtagggactaagttaaaaaattcctctgagagtcaagacccttccgtgtatcttttcccgtatctaccttaattttatttttgttattaccctgatttccttcttctattcatctatattctttcctttctttaaggcccagcttcagtctcaccttccccaggaaacttttgaccttttttggtcctaactaatgtctttcttctttgacatattactatttatcattatatgacttgctgttatagcacacaggtgtatttatattatcatatgtatcatctatgtcaggaattgatttctgaggcaaatatagcttacaataggtaagaatggttttactgggctggagagatggcttaggggttaacagtatggtctcctcttgcagaggaccagagtttggctcccaggatccacatcagagtggcttacagccacatttgtaacagcagctgcaggcagtccaataccctcttccggcctccaccggcacctgcacacacatgtatagtgtccctccccaggcacacatacacatagttaaaagtcaaagaaatcaagggctggagagatggctcagcagttaaaagtactggatgctcttccagaggatccaggttcaattcccagcactcacatagtggctcataactgtctgtacctcccaggggatccaatgccctctcctggcttcagtgggcaccaggcacacacatggtgcaacgcaaacacttatacacataaaacaaaataaaataattttaaaaagaaataaaatagggctggagagatggttcagtggttgagagaacttactgttcttccaagctcctgggttcaattcccagcatccacataaactccagttctaggggatctgataccctcacacagatatacacgcaggtaaaacaccattgcagataaaataaaagtaaataaattatttttaaaaatcagtgtagagcacttgctgttctgtcaagagaacctaagttcagctcccagcacccacatggaggctcactagcacctgtggctccagttccagaggactaaatcctcctctggcctcctttggtaccaggcacacatacaatgtgtatacatatgtgcagggaaatatttacacacattaaaattttattttgtcgttgttttttgtttttgttgttttgttttgttattttgagatagggtctctctactgtgtagctgtggctgtcctagaactcattatgtagaccaggctggcctcaaactcacagaaatccccctgcctgcctcccaagtgctgagattaaaggtgtgtattaccatacctggtaaaaataaatctttaaaaaaaatgaaataattgaaaagaatcagttcctacaattagatcattgtttcctatcatgtggtattgttagctactttgggactttagctttaaaaaaagaatgcttttgcactaaaatttattgagtgtttgtgtgactatatgccacgttgccacgtgtgtgcaagtgcctgtggaggccagaagagggttccaggtaccctggagctggagttacagacagatgggagccacgggaagtggttctagggactgtactcaggtcctctgggagatcagcaagcgagccatctgctgagccaacccctcatcccttccactaaaatttaaagacattttgtatctcatgaaatttatatgaaatccaaacgtcaggggtcacaaacacatttatatcagacacaaccaaacttgtttgttgatgtaattttttgtgtcttgtattcaagcataataggggatggctcaggaaagagtacgtgtgtccctcaaagacaacacatttattaatttgatccttacctggaaagctagatgatccgtaacctagaggctgaattctcattagcatcttttcatagcagcttaagaattgaggtctatttcactaatgactaccctttcaatgctaattaattgctcattagaaggattctcaaggagtaggctgcatgaactgagtaggagctagcctagttagaagtttagtaactgaggcaaccagattcctcctagaaacggaactggatgatctcaggtgggtctgtctcatttccaaccggacagaggagatgtgtaagtacagagagccatgctagaaaagaagactacttgaggtcttatttgaacttggttgttgagaagagatcaaaccagggaatcgtccagacagtgcggttacagttttaacaggctgtcaaggtatcaaccaaagaatgtatctgtgaaagcagaaagtatcagggtttggctgactgaagctgtaagagagtttacaatgccaacaagtactgcaggcatgaaaatgtaaagaacttccttaaaggggtgaaaactatatagataaacagaactacgttaactaaagttatcagaaggttcatgcacttacctgtgccctgtttgttttcttcctcccaagtttttgccctaaaatatatatacaacatatggggatagagagatagcataaggctcaagagcatttgctcttcttccagaggatcagagttcagttccttcggatactacttactacttctctctccttcaccgctttcctgcttcgttttctgtcttctcatcccccgacggtctccccctccttcccgctctctctgtctgtcttaccctagtttggaaatgcagcagatttctgaacctgccatcactgggttcgaggagctgtcagtctgcggatggccgcgtttctattggttggtttggaggcggggaccggagctcactataaaagatggggccggtcaaggcgcgaggagctgctgacaggacctggtcagaaggggtcccttgagcagagagcttcaggcagagcgcccagggcaataccaagcagccgctcgaggcgagcactttctcctccgagcccgctagggcgcctgctccggagccccgcaactttcgaccacggtccacgaatccccggaggacccctcaccttacctgagcctgccacgccccgtccggccgccgggatgagcgaggtgagccgtgcagctcgtgggtcgcccctccacccccacttgcgagtgctccggcccagggctgcggcggggaggaagctgcagctccaggtccccgggaggcgaggggtactctctgtgtggacgccactgcccctctaggnnnnnnnnnnnnnnnnnnnnnnnnnnnnnnnnnnnnnnnnnnnnnnnnnnnnnnnnnnnnnnnnnnnnnnnnnnnnnnnnnnnnnnnnnnnnnnnnnnnnnnnnnnnnnnnnnnnnnnnnnnnnnnnnnnnnnnnnnnnnnnnnnnnnnnnnnnnnnnnnnnnnnnnnnnnnnnnnnnnnnnnnnnnnnnnnnnnnnnnnnnnnnnnnnnnnnnnnnnnnnnnnnnnnnnnnnnnnnnnnnnnnnnnnnnnnnnnnnnnnnnnnnnnnnnnnnnnnnnnnnnnnnnnnnnnnnnnnnnnnnnnnnnnnnnnnnnnnnnnnnnnnnnnnnnnnnnnnnnnnnnnnnnnnnnnnnnnnnnnnnnnnnnnnnnnnnnnnnnnnnnnnnnnnnnnnnnnnnnnnnnnnnnnnnnnnnnnnnnnnnnnnnnnnnnnnnnnnnnnnnnnnnnnnnnnnnnnnnnnnnnnnnnnnnnnnnnnnnnnnnnnnnnnnnnnnnnnnnnnnnnnnnnnnnnnnnnnnnnnnnnnnnnnnnnnnnnnnnnnnnnnnnnnnnnnnnnnnnnnnnnnnnnnnnnnnnnnnnnnnnnnnnnnnnnnnnnnnnnnnnnnnnnnnnnnnnnnnnnnnnnnnnnnnnnnnnnnnnnnnnnnnnnnnnnnnnnnnnnnnnnnnnnnnnnnnnnnnnnnnnnnnnnnnnnnnnnnnnnnnnnnnnnnnnnnnnnnnnnnnnnnnnnnnnnnnnnnnnnnnnnnnnnnnnnnnnnnnnnnnnnnnnnnnnnnnnnnnnnnnnnnnnnnnnnnnnnnnnnnnnnnnnnnnnnnnnnnnnnnnnnnnnnnnnnnnnnnnnnnnnnnnnnnnnnnnnnnnnnnnnnnnnnnnnnnnnnnnnnnnnnnnnnnnnnnnnnnnnnnnnnnnnnnnnnnnnnnnnnnnnnnnnnnnnnnnnnnnnnnnnnnnnnnnnnnnnnnnnnnnnnnnnnnnnnnnnnnnnnnnnnnnnnnnnnnnnnnnnnnnnnnnnnnnnnnnnnnnnnnnnnnnnnnnnnnnnnnnnnnnnnnnnnnnnnnnnnnnnnnnnnnnnnnnnnnnnnnnnnnnnnnnnnnnnnnnnnnnnnnnnnnnnnnnnnnnnnnnnnnnnnnnnnnnnnnnnnnnnnnnnnnnnnnnnnnnnnnnnnnnnnnnnnnnnnnnnnnnnnnnnnnnnnnnnnnnnnnnnnnnnnnnnnnnnnnnnnnnnnnnnnnnnnnnnnnnnnnnnnnnnnnnnnnnnnnnnnnnnnnnnnnnnnnnnnnnnnnnnnnnnnnnnnnnnnnnnnnnnnnnnnnnnnnnnnnnnnnnnnnnnnnnnnnnnnnnnnnnnnnnnnnaggggaggcagagagaggcagagaaagagagagatggggagaatgagagagagtcagagacacagacagacagacagacacacacacacacacacacacacactgagacagagagacagacggagagaattccctggattctgggccccagtttagataggaaagatgagtattttcagtaggtctgctgactactgctgacccaaagtcatcacctagggagtcaattagtgccagctgctgtgttgtcgtggttgccatgtccactgagtttatcctggaaaatccactgagtctggtggctgcagagaaaagagagtagcttccagtacctcagctggttgcgactgcgatcatggcaatcctgcatgcagaaagaaaataataaaagtaaaaggagtgacccttctctggctttttagctctgacatgagaagagaggctttctttgcctgcccccccccatcaccaagatctagggttcaaacctctcctcccaccatcgtgcttctaaatctgactattttaatacaagccacccccccacccctgggagtttatctcatggctgtgctgataggatctgtggttagtttgtgtttatgacgagatacatgtggcccctgggcaggacagaccattagaagatgtaaaaagtgacatttagtgaagtgacaatgctgttgcctggtaagaacaacctgaggtgttcttggggtcattctagacagcagctgaatttgactagccttaattagggcctctgcagagtaagagtggggtcctcagtggggactctgtgtgtaagagtgcctccagcctcctaagctgtcagagcaaactggtcctagctagcaatttagccatcctagctgcctcctaatacagagaggaaccttgcttccgggatgattatttataatatccagaggcagccacctgggtgtacacagagaccagctgtttctaacccagagccccaagggggagaatctcggtctccctgcaggctaaggaccagtctgttttcttcctcttgaaaaaaaaaaaaaaaaaaaaaaaaaaaaaaagctatgatacaagcggaagtgttgcccaaagctctggagctccagggagactctgaatggcttcacttctctaccccatggatctcatctttcaagttgatgtgcccaggccaggaaagtcatgtatcctgaatcttatgtaagtttcacctcccccagctgcttattttcttgcttcagagacactgcacaaaatgagaagatttggggtgtctttaagagattccatttcagctgaggaacgactagaggtgggggcctctggaccagggcatctgggagtgtaagggctctggcagggctgctaaacaggactgctagctctgccttcccttggtggctctctgctgtcactcagtactgcagcagagcatttccctgggtctacatgctctggtgccgaggagctgcagggactcatcgccagcttgcctgtgttcacagctggaggcagggcttgattgctgtgaatcacacagtctgtctcctgtggtttaataactttcccctggttcctgcgatgcttggatatgggaaatacacccagtccccaagggccccttcctacaatcccttttttatgcagtatagatggctgcacaaagcagaactgcagggttttgcactttgcatttctcatctgtgagaaacttaattggaagaatcctttggtccagcagtcactctgctgaaatgggagtcacggattactggtgacagtccccacagtttctttcctgagttttagctggcaggggacagaacaaggagcagatcatctagatcattaggagagaacttaaaactgctgctctctcctttatcatccttttgatgtgttcttacctagtggaaacaagatactgctctttagggaccccaccccagccttgtacatctatctgcccacaaacgatattcagtcagagcgatggagttctattgtgtcttctgtgagccagctattagagaacttgacatccaagtctctctctctctctctcaccacaccacacattaatggtttgttaatattatggttaagttgaacatacaacataggactgtctacttattattcgaatgtcttctagctctgaaaatctgcttttcaaaacagggaagtcagaatttgttttgcaacttttttgttcatccattatttgctcacccatctaagttgctggcttttgctgcttgaataagattttctggttggtaagaaattgatggttctgtcatcgtcttttcgggggggtataaaaatgactcattctcccaaatggaagccacgatctcatggaatgtcacgtttctgtggggcaggtgaccatagggagtgtggtgggtggatctgatgcattattcctccctgtctgtggaggggcctagctggtggacatgatggagactgtaacactagttaatgggaagaagacaaatcaacaggtgtcttttcaaagtgttgattctgtgagtgctgttgattctgtgagtgcttaccgcttttttaccttctactttgctagatttccaagttgtttttcctaagtctagttcatcatagaaaaattaaactttgttttacaagaattctccaaggtagaaagtcaggtatatctttaagcaggaaaacccccaaaggagatatcaagacattttagtggtagagttttagatttgctgaagcactctaaaaatcatctggttcagtttgtacagtactaaaaggctcaggcacagtgctgccgctgtctctttctaaatgaattttcttcaggactctttcaactcattactccattgaatacagaggaatctcatttatatgtatattttttaaaaaatatggcacaggagattgaatccagagcaggtactttatcactgtcttttccatttgaatttttatttttaattaattaatggagacatatgcttgtactttgatgtcctcatgttactggcctttgcctcccaaatggtgagattacaggcactcaccatcatacccagctccttttgtatattcttttgagacaggttcatatcaagttgcccatacttgccttaaacgtgcagttctcgtacttttactcctcctcccacttttcctcagtgtctgacacaggatcccagtatgtaactcaggctgatctggaactctctatcctctttctctgactcccaagcattgagatcacagatatgtgtaaccatgtcccccacctgtagcattctctctctctctctctctctctctctctctctctctctctctctctctctgtgtgtgtgtgtgtgtgtgtgtgtgtgtgtgtgtgagtgtgtgtgtgtgtgtgtgtgtgtctttctgtctctcttgtcttaagggaaagtctactatagcccaggctagcctcaaactcactggatgaccaaggatgaccttgaactcctgatcttcctgcctccacctccctagtactaggatataccaccattctaggttttatgcagccctggaaaccaaacccagggcttcatgcatgctaggcaagccctctgcctactgagctacattcccaggccctatctgtaactttttttttttttttttatagagacagggtttctctgtgtaacagttctagctgtcctggaacttgctctggagaccaggctggcctcaaactcacagagatccacctgcctctgcctcccaagtgctgccatcaaaggtgcgcacccaccaccaccgggattaatttctaatgaatatattataaatactttttataagcaacataaacagtgtgatctatctaataaagtctgagtaagaagatagacattttagagacctacaagacctagctatttaccaacagggtacattttggtagactactgtttccaaaaactaggtggacggctcctgaagaacgaaccatgttgaggttgcactcccacgaccacatgcactactcacatgtatgcacatctctgccccatgcatagtgcgcgcgcgcacacacacacacacacacacacacacacacacacacacacacacagacgctaaatcagacacaggcatcacaaccactttgtgatggtacacatctgtaatcctagtatacaggcggcgggagccggcggatagagagtttgaggtcccctgggctatgtagccagttcaaggccagtctcagttatgaagggagatccttcatcaaaaaataaatgaataaacacaaaaaggcgaaggctgtctgtagctcagttggtggattgcttgcttagcaaaaccctcagtttggtctccagtaccacataaaacaggatcctgtaatcctagcactcaggagttagaggaagggaagtcagaagttggaaaagatcctccccaggtagtgagtttaaagcctggctgtgttatatgagaatttatggagagggagacagagaatatgagaatgaggaagagtaaacaaataaaataacgaatgcccttcctctttttttgtacaaaatctgcattcctccaaagtgtctttaaataaatacctagaagcccagactttatgtctaggtatggtggtgtgtacccatagtcctaaaacttaggaggcgatagcaagaagatcaggagttcagtgcatatagagttcaaaaccagcctgagctacatgcgaccctgtctcaaaacactgaaacaatacaaaaacctaaaacagcaacaaaaaaaacaaacaatgaacttagaccttgtgatcttctcacaatggcctagagctcattgactcagactagcctcaaactcagaaatcctcctggctcagcctcctgatggagtgagctcccacagtggtgagctaccttcatcaactctggatttaatttctgcttcccactgggtggctcctggaggctttctcacctggttcccaacctccaaccagggaaagcagtgccatttaccattctattgtgcccagtgcagcctccctcccacacaaagccctccagctgagtgtttgctttgtaggctgtggggggattaatgcgtttattttagaacattaacaccacgggtgggatgcacattgaagattatagtaataaatgaagctttggctttactctctctctctccccatcccctagtcctcagtatggggtaaaggcacagctccaagctgtgtgcagagtgccacaaataaccactcattaaactgtggcagcccaggctgagaggaatgggcaggggctgttgactcacagcataccacgagttggcatgggcaagggactctgcccctgactctagtggggggtactgctattccaggaaacagtggggtggctaaggggagagatacaaaccagggtactattccaggaaacagggtggggtaactaaaaggggagagagggacaaaccaggggactgggactgtttagggtaagaggcatctgagatgtcaggagtctggcctctattttctgtattaggagaggcatgtgcttatggagaaactagagtaaaggttcctagttctttttctgttattatcttgagggtgaccttgagcaagtctttctgaagctgctggaggactgcagctggttgctgcactgaaagagttgaaacagttccaacagttctccaaaaacagcagtccagggttgaacaggggcacgggatcccaaggcttcttctgtaagggcctttagcagtgactttcatctaacactgggagagagaccccttcagcactcaatagaaacacccccatggagggcaggaacaaagtctaccacctggaaaaacatccattaactggtgccccctttaaaatagccactaatttgtgttctcctttagttcctgaaaatggagtttgtgaagtctccaattcgtgacaatacagagacaaaaggtgggggctcatcatttagaatattttggcttcaagctctttttaggtttctctgccctggtctacagaggcagaaccgtgggtatccgtggctgtccatcaaagctaaatgactgagaaagcactatagttggtgttttcatctgcacagcacccaagtcatgtcatataaatgcagggtgcagctggcccaggtacaatgatccgattattgctgctattaaccatctgtgatccctctttacagagacccagactgtgaagagtatggagaaagtcaaatagtttacccttcccaaaactgatttttttaacttgctgcttgaaaagggggcgggggctacactctcttcctcttctggtggtgatggttgctgtggtaacaccgctacagagaaaatcggcaaaggaagaaaatgaacaagggactggggcagggtgtgctggttccgtataacactgagttttggggtacctactccccaatagtgacagctgggaaggagcagctaggttgctgctgcttcagggactgccttggggtgctttgccaagacactgctgactcatataattatttttggattttagtttttttcttctttctgtgttttgtttctttttttatttttaagagagggtttcattttatagctcgtattgacctcaaactcatgatcttcttgactcaacctccccagagctgagatcacaggcatgctgtaccatccttggcacaattatctttgagtttgtttttgttcttggtttttaaatgtttctgggggtgggggtatcctgggaattgacagctagtggtcttcttcttcttcttcttcttcttcttcttcttcttcttcttcttcttcttcttcttcttcttcttcttcttctctttaagaagggtctttctattatgtggctttggctgtcctggaacttgctatatagaccagattggcctcgagctcacagaggtctgtctgactaactctgcctcctgagtgctgggattaaaagcgtgctcccggcagccagcggtagcaatactctcatccactaagcaatctctccagcctccctcacatctttaagctttattttcatgtggatgtaatgattttgcttgagtgtgtgcaagcgacccgtgagcttgcctggtacctgaggaagccggaagaaggcactagatccccccccccgccccccaactggagttagagttaaagatggttgtgaactccaccatgtgagttctgggaactgagcttggtcccctggtacagcagcaagtgctcctaactacttagtcattgctctagctttaacaagaaatttgcaaaaaatttgttttaaaaactattctatggtgaatcatgcctgcaatcccagcacttaaaaggttaaggaggattgccataagtttgatataagccagggccacatagtgaattctaggtcagcttgagctatacagtataagactatcaaaaaactaaactaaactaaacaacaaccccaaaccaccccccaatcttttgaatataagttctttatcagatatgtgaattgtaaatattttctttctgcctgtaggttgtcctcttcttcactgaggaaaaattcagtttataatctttttctgagttttgctttaggtatatctaagaatttttttttttttgtatcctaaggttacaaaaactttcccctatgctttattctaaaaatttacatttaattgtagctgtcttattgaggcagaatttctttcttttcattttttcaggatagagtttctctatggaacagccctgactgtcctggaactccctctgtagaccaggctggcctcaaattcggagatccacctgcctctgcctcctggatgctgggataaaaggcatgcgccacaacactcggctttgagaggggattcctatatagtgctggtaggcctgcagtgctgtgagaccgagatctcaaacttgcatcagtctccctgcctctgcttctcgaaagtttaggttttgtgtctacttgtagttagttttctgtaaggtacaaggtatagtttgaggtgggcttcttttacttggttttgcaaatgactgttcaatcgtttgttgaaagaagattcctcctctccttcctgccccagagtccctcttctgctttcatgtgacatgccttccatcattttctcctgtttcttgacatctcttcctccccttcatggccccctttctattttcatcttgctcgtgcacccaggacaccctcccctcccgcccagagtctgcatgtgagaggacacctgctgtttgtctttctgagtctggtttatttctcttaccatcatgatctccctatccttttaacattattgcttctaagaccttgttccaggcccaccctggttcttttcattctaacagtgctcggaaaaaggaattcacgtcaagagagagagagaaaggggtttgagaataaaaggaactgattgtcctgactcctagaaaagagagaggggatgggactgggagctcaaacagacaggacctcatcaggatgctgatgaaagttctaggaaggtggagatgggaagtgtgtgacattttcctgtactggaactggaagaactaaacagggtagataacttattggagggaaatactagagaaagggaagatggtcccgatctgcatcttaaagcctaaaggaaaaagttctctaacccagcaggccttttgttttcatcaccaccccacccacccccaaaattgggagaggaaagtacacaactttgagctacagagaaaacaaaagtatactcttagggaattggcacatactgccaagatgatggaatggaacattgttggaatacatcgggcccagaggagagagagaaggaaaggactacaagaaggtaggcaaggagagagactagggctctctagggaaagcaagagttgatgggcttcacagttgctaattagtgtttggtactgagaagtgcgaaacaattagtcctgtgtgggcaatgacattgaactgagccaagctccaagctcactagaactggaataatggttttgaatgttagcaagggagtcatttgctatggaaacgagtgggatgatcttgcacatgtaattctcagactctgaagggccaggatctggccctgtgagtgaagactatgtatgacgagtccccagagcacagtttggtgtgtcaggaggccctcggagcaagcaccaggaagcaagccagatggtcagaccacaaacagcaggaatctgagtgagcattcgtgatttgggataaagtcctcacagagcatgtaagattgcactataataagaaggcacgttccagctccccagtgttccctgtggagtatatgtgaagaaggtgttttggatgtggattgtaaagctagagtttggattcagctgcttaaatgtaggtagagaattaagtcatgattcctgagatctttccttcctacctggggattgccgtgctgtatgggataacttgtccagtcactcgattcacgttagcgttctccctcaagttcaagtgagtggacgtgagtgcatacacatgtactctttagttgtgaactaagtatcacgtaacatagtgtgttctagagcctggactctagctgggcagtggtcatgcacacctttaatctcagcactcagggaggcagaggcaggaggatttctatgagtttgaggccagcctggtctacaaaacaagttctaggacatccagagctgttacgcagagaaactctgtcttgaaaaacaaaaaccaatcaaccaaacaaaaaagagcctggactctaaagttagactgtctttctggctttaaatcctgaccttgtgatttaactctatgatcttaggccaaaaaaattaatcactcttgacctcagttcctggtttgaaaaatgagaataacaatacctattttatggagctattagaacaactcggcatgttggtgtttttaatgtgcatacaaaagtaacagattaatagtactatctatgtgataataaataacagagtaaggtgacattcccaagtctttggtttctgtcagttctcctagttggatcctgtcgggagaagaaaggctttgctgaaaagtattttaccattgctatttctgaccagaaaggagcagaagcactgagaggtttgagatccacactttcctagattgaggggctaagaagaggctgggcaatgaagatctgttacagctcttgagctgtccttgctcctttggagatatgagtgtttgtaaggtgttctcttatagagcccggatgaacttgaattatggagtctgacacctgcccatacatgaaccagaccaccctgatttatctataaccaatgactttctagaaaacaatcagagcattgaggcagaggacagggaccattgggaaaactgagtatcgtatagaggctagtccaactgttcctacccccaacaaatcacaaacagctaaatctagaagtgcagtgcccagggtggctattttgagaactggctagaaagaatggagtggggaggggcaggaagaagaggggaggggcacctttcaacagatggggtgagggagatttcacggtgtgttgtgagcaatgaggaccttacagtgctcctttctggcctctccagtggaaactctcgatcttaggttatgacctttcataaatataacccaaatggagctgggagcccctgggaagccagatcacagccactgctctattccgaggtcaggccagactcaggaaagagggaagatggcagcctgtgtggttcagccctgacacatagcttgcttagggaagtttacagctcaagatcagctgccatgagaagaaagcagcctgtgttaactatttttctagtgttgtgataaaacaccttgaccaaggctacatgcagaagaaagtttgtttgggcttacagtttcagaggtttagagtctgtgacagtggagtggaggcagcaggtgttaggaattgaatgctgaaagcagaggctgagggcccacattttaaatcagggacataaacaagagggaatgctgttaagtctttaaacgctcaagatcagcctgcttccagtgacatacttccctatgggccacacttcttgagtctccccagacagtgtcaccctctggggactgtatggtttgaatgagaagggccccagaaagggttctgagttggtggaactgtttggactggactaggaggtgtggtctgggggaagtttgtcactggggatggctttgaggtttcctagtgtctctggctcctgcatgtgatttggttcgagacgcgaaccctctgctggtcctgctgccaaggcttcaccctgtcatcatggattctaatactctggaaccataagctctattaaatgccttctgttataacttgccttagtcacagtgtctaatcacagcaataaaaatgtaacaaatatggcgtcatagttagggtttctactggtgtgtgataaagcacagatttagttagggtttctattgttgtgaagagacaccatgaccataggtggcattcttataaaggaaagcatttaattgaggtggcttccttgcagtattagaggtttagttcatcaccatggcgaggagcgtggctgctgggagtatgtcgacaagcagacagacacggtgctggagaattttacatcttgatccaaaggcaacaggaggtgaactatctcactgtgtgtacgagacctcaaagcccgcctccacagtgaccacttcctctaacgaggccacacccactccaacaacgtcatacctcccaatagtgccactccctttgggggccgtttttttttttcaaactgccgcaagcaccatgatcaaaactgacttcagcaggaaagggtttatttcatatgacatcttgtagtccatcatccagagaagtcagggcaggaacctggaagcaggagctgatacataggccatggagggatgcagcttactgacttgttcctcatgacttgttcagcttgttttcttacagtacccaggaccatcggcccagcatagtactgcccacagtgaactggggcctctcacatgaaggaatttaccacagacttccccagctaatcctgtggggacatttttttatttgaggttccctcatctaaaaggattctaccttgccaggcagtggtagcacacacctttaatcccagtgcttgggaggcagaggcaggtggatctgagttcaaggccagcctagtctacagagcaaatatagcaaagcatgctatattttgaaggctatcttgaactcttcaaccttcatctcccaagtgctgggattagagcctgtgtttccacactcgggtcctcctaactttttattagaatagttaaccagagttgaaagtatacttcagtgtgcatctatgtgcctgaaatagtgcaatcattattaacatattagcacattgtgtcagcatatgaaaatatctggtctgtggagccagggttagtcttcctgtgttccacaaccgggtctaccattttttatttgtatgacttggccttgggcaagatctagaacattgttctaaggtttgtttcttcacctataaaataggatgacatctcagtgaattaaatagggtaagtttcacacacaataatagatactcagtaattattgcttagttatctgttttctctcctcactctgccagctagttttatgtcaacttgaagctagctacagtcattttgaatgagggagattcaattgagaaaatgctcccatcacattgtcctgtgggcaaacctgtattatgtattcttgattggtgtgggagggactggatcactgtgcatggtgccacctctgggctgatggcccagggtactataagaaggaaggctgggcacgccactaagcagcattcctccatggtttctgcctcggtgtctgcctccaggtttctgcctcaagttcttgccatgactgtcttcagtgatggacggtcctgtaacaataaatctttccagcaaactgcccaagttccgcccacggagttagggccccaaataacacaaagagacttgttttaggtacaatgctgctggacaatgactaggatttctaatctgctagctcagtcttaattatcaaccataatcataagacactgtcttcatgggctcacatggtggcttcagaccagagagcaggaagaagagcaagagcaagaggatgacttcctgtttgtccctgcttatatatgagtctgcctgctgtgtcacttgctgcctggatcacaagacttctttgttttatttatttatttatttatttggtttttcgaggcagggtttctctgtgtagctttggagcctatcctggcactcactctggagaccaggctggcctcgaactcacagagatatgcctgcctctgcctcctgagtgctgggattaaaggtgtgcaccaccaacaccaggcttacaagacttctttttactacatttcccagaatcctcctcgactcctagtcccacctgtcttgctttcctattggccaacagtactttatttatcaaccaataagacaaacatatacacagaaggacatcccccatcactgtcatgtgccactgtaagctgcaataaacccttctctccccaggttgctttttctcatggtgtttattacaatacagaccctaactaagacacctatcctgaaagatcggggcagtatcttggttgatttcactttaaatccatagccactaatctcacgagggctctttctcactctctggtaatcctgctgtatcacacaatcactcgctttcttagatgactatgtcactcattctcagcttttctcaagcctttatcatttcttgatgtagtaggctttcatttgggccaccaggcagctcccaaatcacgacatggatacttattattaattatgagtgttcagcctatctgatgcttgtcccactagcttttataacttaatttaacctgtttctctccatctgtgttttacctcaaggctttttacctttctttcattctgtatgtcctactccatgtctggctgctggcagcctggctgactggccccaggtgtctccctgtctttcttcctccttctcttctcttttctcattcttctctccacctgccagccccacctatccctctacagcctagctattggacattcagctttttattagatcaatcaggtgccttaggcaagaaaggtaaaacaaatgtaacatatttgtttttacataatcaaacaaatacaacaaatgtaacgcatctttgcctagtaaaagtaatattccacgacaccttgctcttaactcggatgaccactgcccttcttgtttcactgagaaaaataggaacactcagtagagatcatctgtacattcccatcacgtctgccaccagtttgccttcattcctgtctgtaaatgctgcgctaacactctgtctacagccaacccttctgcttacatattgtatctgttttttcttgctcattcattcgagatgccactctggcaattatcctttctctcttctatcatcaatttttccttctcatcagcattcagatctcctactttaacaaacacctttctgcagcctcatatctgtcccgaactgttgtccagttctgctgtctttaaagagaaagttctttcacagagttctctgtactcaaggttgcacctgccaatctagcgtgttagcacaaaagtttttttttgaagtctgatactctctgtcacttgtcactatgatcccagtcttaatgcccactcacctgcttagaatgatgtaaaaccttcctaattccccgccccatggtttacctcttttttgcctgtagtttaatctctgccagatagaacaatcccttaaaaacatgatagagaggaggcaatgtgagcagcctcctcacactcctgctgccatgcctccttgttcatgatggcagcgtggcctttcttaaatcggaagctgaagcaaacccttactatgaaaaacagcatatgctagagagacaggcatcatggcacacatgtctgtcatcccagaacttgggaggtgaagggctggaggcaggaggattaattagttcaagggctaccctgtctgcatagtgaccccatgtcaatcaagctagcaaatgacaaaaaagaaacatctcctgttggatgattaatagatacccaaaacttgtttttaaacccaaaaccaaaaccagaagacctcctggtcctctctccctaaatcctatgccattcgctgtcttctgtgcagcgggaaatgagaactccttttttttcatttgtcaggccagttctcctcctcaggagccatccttgactccctgtttaccacaataccacttacttatccaattaaaatcaccttgatcatagtttgaaaagaattttcacaacctcaccacttggctccccgcattcccactgtcctgattcaagctaccatcttctcttgcttgggtttctgcagtaatccctcccctctcctcccaggctttctgcctcctctttcatttgccttttgtgcaaatcagagttctccaagggttttacttggacccctctccccacccccatgttcttcaaagaggccagtcatacttccacttcaggggtttgccatggatatccagtctttaccaccttacctccttcagcttcttggtcaagtgccacctttcagagagacttttccaagggtggtgatatagttcagtgttaaagcacttgtctagcattcttgaggccctggattcactcctcagtactaaatagtaataataataataacaacaactccacagttgactcaatgggcttttcctgacaactatgtaaaggcccgttcctctgtccttaactagaattccattacttccctagcttgccttttctctagtactttttgtcaccttacagcacagtcaccttgtttgtctgaatatccctcgaatgagctctgtgaaggcagggttaccgtatctgttttgtcctttacaatttggtctcgtgaatgctaggattacaggcattgtctgtcacactgggcttattgaatggatgttgatgattttcatctgatctcaagacccacttcttccaaagatttggggaatatgcctgctcatgggaagcttggctgtgcataaaaaatctaaggcagtggaacctttagacttccatgtgtatctcacagtgttattcttttcctccagctcaacacaaaaacacccccagcaaccaaccaggcatctgaccctgaggaaaaaggtaagtgaggctggcctaggctgttagcggagctaatgaaggtagaaacatgatgcaagaagaactgtaaatctagaggctcctaataccagatatcaaaggaataaggggtgtgggcaagcgaaaccagggagtactatagctctaggttcttgctactttttcctgagatgtaattatgtcagcattctcttttgattttatcaagtaaagtcttgtatggctggaaaggacatgtacagtgataagaaggggccagcaagatggctcagtgggaaaaagtgcttgtttgccaagcctgatggcctcagttcaatctccaggacccatatgatggaagacaagaagtggcattcacaattgtcccctgaccttcacacatgaggcacatacagattgggggggggtggcagtgggaagtaatatatttaaaaagatttgtttatttcaaaaaatttctatgtatgtgtattggtctgtatgagtttatgtgcaccacatgcatgaaggtgcccaaataggtcacagggcttcagagcccctgcaactgaaattacaggtgattgtgagccaccagatgtgtatgctgggactgtaccctaggtctcccacaagaacattaagtactcttaaccactgagccatttctccagccccacaaaacatttttgagtgatagaagaaacttatcagataatccaagccactgttctccattagaaattggaggaaggaagtaccctttgggatttgaatgacaggatttaagaataagtggtgatagaagacatttgtcactcgacccaagaatcagcaaaacttcttgtgatagcaatgctaattcgaagcctagcaccctaacttttagaatcatcagtcatctgtagtccttgagaagactgggggacctgacagtctaactcaaagtggactcagagcactgtgtttgaggctgggaggacagggcggtaattggttgggttgactcatcaatgagtctcttaactgtccacagggaaggctggcagcatcaagaaggctgaggaagaggaggagattgacattgacctgacagctccagagacagagaaggctgcccttgcaattcagggcaagttcaggcgattccagaaaaggaaaaaggattccagttcctgaatggccagccttcccttcattcttctacttcctctctgccctccacagctctggctctcatgtgtcttgtccctttatccctctagcctctcctagaggcaagcttaaccttgatatattctcttctcaggctctcttaagccgtcacagttgtagagacacaaggacacaagaagatttcagttggtagtcactaggctaagggtgggtcagtcccttgcagagaacaaatgacttcgaggtttgacctctctctatccctaatgctaagggcaggatgggagtgccttcagagtgcagtgcctgagggtggggtgtacgtattctcccagatgcagcattcacactccaggtaacactttctggtcctttgacaccatcccttccatctcccactattcagccacaatgcagctgccctttcccctgggcagacagaaatcaagtagtttacagagtggtggtgcatgccttttgccccagaacttggaagacagaggcaggtggatctctgtatgttcaaggccagccagggctacacagagagagaccctgtctcaaaaacaacctgtaccccccccaaaaaaaatcaagcagcttaacgtattagtgcatgctgagtagatttcttccaaggaaagaaagcaggtagaggcaaggaaactcttctttcattgtccagtctgaagtcagaggagccagagatggcagaaggtctggagaaaactaggaaacatttaggaaggaaagaaaagtagaaaagggcaagatgtctgaagctacaagttattgttaaatgcatattactcaaggggctctctggcctttgctaatctgcctacctcttaatccacccccatctctagttatccccagagccacgagagccacgtgacaaccctatagttctcagctaccccgctgtggagtcagggcaaaaatagccactgtatatgtgattttagcatgtttagttatcgtaacaataataataaaaaaaaagccttcaaatgggaccattgaacctctactagtgtttttttccccccttgggttaaacatgaatgtaatcctaaactggccagggagggtggtaaagaaactgtacagattacatggtgtcacaggaaactcatacagccggaggaaatttcagccgaagctaatcctgccttccttctcctgaccttggcctcaccttgatgcaccgcccgcccacaccgctctgaggcagttgctgtcaccacccccagggtgcacctgcaaggataatgtctttctgtgctcctgccagctatgagcacacttggtacattacatgtttctgaaaacaaacctattcttccctgcttcttatccccaaatgacttgttctagactcccctccttcttggtcttcctccccgatactcccctcccctactagtgtttataaagttaagaggcagtgactctggacactaaagagtaccactcttacactgaggcttttgaccagaaatcaaataaaaataatgactttcaagtgagctatcattgctgagaattggtctctacacattaaaatgactcaagactgagcaaaaaaaaaaaaaatcatctgtgcttgccatatttctccttacatttttgtgggcagtgatgattaaagcagtttcactacactaatcaggcacagaaacacacgtctttaatctcaacactcaggagacagaggcaggcagatctcttgagtttgaggtcagcctggtctacagaacaagttccgagacagccagggttgcacagagaaaccctgtctcaagaaaaacaacaaaatagtttcactttgtagtccaggctaacatagaacttgctatggagcccaggctgtctttgaactcaccgacattaaaaaccaagtttacaaccttgtaccattatccccagctagtggtttttattttgataaattttataaaacataaattttagcatttgtgttattcatttttattttatgtatactatgagttggagatttttaattaattattttatttttatctgtgttttgcttgcatatatgtgtgtgtgccatgtgtgtgcctggttcccatggaggtcagaagagggcatcagatcccctggaactggacatggttgccagccaccatgtcggttcagggaaccaaactcaggttctctggaagaacagccagtgctcttaatggctaaatgatcattccagtcttgggttacttattttttatgtatgtgagtgttttcctgcgtgtatgcatgtgcaccacgggcatgcctagtgtctatagaggccagaagacagcattggatttccctggaactggagtcacaggtgtttctaagctgtcatgtgggtcctgggaactgaacttgggtcctccacaagagctgcgctctatctctccagcccccaaattttatcttttaaacaactcccatcctctattcctaacctctgtgaatttaattgttctaccgcccgtatctatagtttcattttttttaaagaccatgtggctgagattataggggtgtacctaaacctagcatgctttccaacccactcccaaagcatgacacagatttaatatcaattatgaatgctcagccttatcttatgcttgtcccactagcccttataatttattttaacatgtttctcttcatctacctattgccttgaggatttttaaatttctttcattctgtatgtcctacttttcctgcttcttcagtgtctgtctgtctggagactgcctggctggctggcccttagcatctccttttctttctccatgttctcttctctttcaagcctagatttttccttctacttattctctatgcctgccagccctgcctatccctctactgcctagatattagccattcagctttttattggacaaattaggtgccataggcaggcaaggtgaaacaaatgcaacgcacctttacacagttaaacaaatgcagcataaacaaatgtgacacacctttacacggttaaagcaatagttcacaacatagcacccttctggttttgatccaagaatacagaaatcaaaaccatgcagcagctatgagtaagaaacaagcaaccagaatctctggaagtcagcctatattccagagtatattcatgcttagtgagcccatggctatggaatattaatagaattgaatagtaactcataggagggccctctgcaaaaggaagtacttcttccccatgctagagaaaagaaggaaatttcattgttatgtttggatctgatatgagtgcaatgtagcaatcatataggcctttcatctcagcctcataggctaacaaagttatctcattgctgtacctgggatgtgtccagtacgccctaataaaacaggtactcccagggccagagaaatggctcagttataaaagtgcttgctgctcttccagaggacccaggtcaggtgtaactccagctccaagggatccaatactctcttccaggctctgtggccactcaaatacacacacacacacacacacacacacaccaccaccaccaccaacaacaacaacaaatcatgtaaaatttattttaaaaagtactgcctgtcctttggcccatggacgagatgagaattcaatggcgctctacctcctttgtctgcccctgtgacactgaggccaggcaggagcttcctggccttggctgtgtgggagctggctggtatgaggcatggtgattgctctgtcgccagtctgtttcctgtagatctgctgcttcgagggtatctgctgactcattttgccacactaatgtggagcctgttgaaacagcgcccactccttcatatacatttggaataaaaaggtgttatagcgttaatttgggaaagatatttctgaccaaaaagagagacttgggcatcttcagctaaatcagtggtgattctcagctctaacagctggttctcttccacctgctgttcctcatggcttgagctagcttctctctgcctacctgaaacactctcttgaggttcagggcttttgatggggctctccttgggaccctaaagctctgccaaagaaatgatccttaaatgctaatcacagagagatttttttacgagtgttttgtaaaacaaaaacctgtaaatctctttgtgctacggaaaggctgttacaaatggattagcagaaaaaataagcgtcagaaaaaaagggtcacagagtatggatgggtatgcctgtaatctcagcacttgggagatggaggcaggaagaccaggagttcaaggtcatccttggcaacatacttagtgcgatgtcattctgagctacatgtgaccttgtctcaatccccatgccccaaaaaaagcttaaaagaaaaaaaaaaacttttatgaacattacttctaacaacaaatgtgtgagttcacataaaacagatctccaactctgtaagatgtcttatcctatagttttgacaccaggtatccagaattaatgccacttgtgacttgcacttctagctaacctgctgccagtcagaacacttcctcctgctcagtaatttgctggaatggcttatagaacccgggaaagttccttacttactattgtcactttgttctaaagggttcagctcagaacccactgtggtggtgaacacttgtaatcccagcacttggggttctgagatgagagaaaagtcccctacctgtctcctaaggaacagcaatgaaacagaagaaataaacagagccagggatgaggtgaatggaatcctttgggcatgttcctggcacactgatataccaacctgaaatctctctgaactttgaaccccagttttagggcttttgtagatcatcattacagaagcctgattaagtttgattaagtcacctgctgttggcggttaaatcaatctctgctctctctccccttcctggagatcagggttgggttaaaagctctaatcctcaaatcacaaagttggctttcatcaatcagcctccccatcctccaggagacatcttggagtcataactaacatccactttgctatgtttgaattggacttttgaactagctgaggtggtgcatgcctctaatcccagcactcaagaggctgaggcaggtggattgttttgacttggagctacacagtgaatttgaggtcagcctgaaccacagagggagaccttgtctcaagcagggattaaagggtttaggaatgctaaaagatattcccctcacccttatcactcagtaaatgccaggggtcccaagattcctgggccaagacctgagggtgaagaccaaaggtatgttttaagtaggaactagtccaaggcttgaggggtgggggttggggtaaaggaatttattagactagaattaatataaaaatttaatgaagaatagacacttcgggcagaagtacagtaggtgggctctactgttaaagttaagaacacttgctgcattggagaggacccaggcttggttcccaccttccacatgacgaagcatacaactgcctgtaacttccaactccaggccatctgacaacctcctctcatggcctctgtgggcactctcaagcaggtgcataaacaagtgcaagcccgtgcacatgtgcatacacacacacacacacacatacatacatacaaacatacatacataacacacacatacacacgtacatacatacacacaaacatatatacataacacacacacatacacacatacatacatacacacacatgcatacatacacacatacatatatatacatacatacacacatacatacacacatttttttttaaataaagaaacagagagagacagacacccaggacttaatgggatcctttaatagcagaagttactcagccttgcctcctgggccatttgtgcagggtcatacttgaatagaattcagagagcacttcacaatcccgaggtagtaatccttagatcaacatttgtcttccttgacacgagccactagggatgaggctccagaagccattaggagccggtttctaaatgtctaaagaattacaagtcactgcaccagactccagagagagaggctctgtcagctagagagtggattttgctttttctgttttgcccttttggctctatattccttagtatatcacattatcatgtccacatcaccgacttctcttctggagctttctcaattgtgcagagctgacaaaagtggaagtggtctggggatcttgtaagctagggatatactttcaattacattcccaaagctcagacttggagagataaaggcctgggtagggtttggggtggggactgggttgggtactgggatagggtgtgctggggcgattcagacagttaagagttaagggttctctttctggtcaatctttcgagctgcattcagagacttgacagtgttgcacagtaggaatgcattgatcttgccctggtgttgagctacttcctttcacttccatggctatgtcttagaggaatccctctgtaagctactctcccttctcagctcttagcttctcattgttgagttttccttatttctgacattgtttgcagtggtggtggctcctagtagcttccttgtccctgccacatgttcagtgtttgaaaatcagtcctcattggactcactctaattagctgctgtcatcctgcttgtcataacccctgtaactgtagtccctgctgtctgtgcttctggaaatggagagtttgacggtgaggagttttgctttttatagtaagttgggtatcacaggtgctcttctttctggttaagtggcgggtctgactagaaaggcaaggggttcacaggtgggacacgtacggtgatgtgcctgccatcgcgacgtcacctgttacacattgcagacctgcgtgaggacactgcacatgtgtgaagcctcattgtgcatgcttggctttacctgtctgtcttacgctctctctttctctggcaaccaaccatggtggtcagccgttaattctgtctctcttctcttttactctctgtcccgctctgttcttctatttctctctctctagctctcctgtgacacaataaaccatggttaatgtatctctgttctcatgtctcatctctcttgtacttctaatttaagcagaaatctaacacctgatagttaagaatccaggaaaaataagggatgctacacaataatacaatgacctagaccatgcaaaagaattgtcacacaccctttaacagtttcagtgggcctagtgagatagctcagcagttgagggcactcacctgcagaagagtttgatctcttgaagagttagaacttagccttgcctatgtagtgtcggggcccggcttgtatcagtcccacgctacagaggctatctattccggactgatgcctctcggggtgagatggggccaactgaatggccccgggtccatccctgaatggggggggggtgctggacaaggaaactcctagctacccagtggcgataaagacaagacacaggcatcttgtcatatcaggagggctctcaatctatgctggaaattggagtctctgttattcttttgtttaaattagaaataaagaagagcgcaagatgagacatgagactaagagacatattaagagacatattaactagtttattataggcccagcagagtagtgagactaagagagaagaggaacagggttaatggctgaccgccatggccggttgccatagagaggcagagagaagagaagcagaagcagagagagagtgtaggcagaaaaagagaagagagcgtaagtgggcgggggtctatcttttaaaggggtcctctacacctgcgtgcagatttagttcccatggaaccctgggctgaccagggtactgcctgagtggatttgcggtaacagggacatgccaacataatgcctgaaactttcaataccacctttggcagattaaggaataagggcattgaattctcaagaccaattcctgctgacatggggggcattgaccatctttgggggacctgagaaggttggggtgctgccatgtcctggggtagttggttgtttcatcgcagtccaggctgtatggaactccctggcatctcttagacctggcaagatgttggcagagcagaggacaatgtttttagaaaaaaatttttttttcttaggtcctggcacttgagggcaagattgtaagatgagggagggattcccaaggagtcccaacatgagagaagggagtcctgagaccagggaaagaatgaataactggagtgaatctgacctgtttgtttggatccaattcggctccctggaacttacaggaatacttagagtttgtggaaacataagtattagacacattagcagcatattcatgttagaagcaacttggctgaaagcattaacattttaaaattgacagatattttttaggacaatgaaaagcatcttaatcttgaccttatagttatgatcgtatagtggtattgtagaactttactatgaaaagtagcataagaaatagagaaatccagaacatatttcattctttttaatgtctcaactcactttatcatcacttaagcctttttatcctcagaccttcataactttaattcgtacaccttatattaccatcttagaccttccattctcagacctttataccttccattctcagaccttcacaacctgcatttatccaccgtgttagacctttccatcctcagacctttgtaactacattcccagaccttctaatgtatagcgtacattttcctatcttcacatcgataaaccctaaaatacctgttcctggaatctgtttttgtttaagctggcaagactactagtcatcaaaagcatcagagttcttgaggataagattttacctgaattaatgattaaagaataaaagagacttgccagcaggctgcatggacagccacccccaaggtcctccatccatagtagtgggctgcaggacacctgccttcttgctgatagcatgtgacctgtggattaaggactacaggaaggctcccctactgttggcccaagcaactcggggaaagtcaattccactgtcctcttgtacatggtctggagtactttgtagcagttgaggtgaagggcagggttgctcagtgactagagttgtcactgactcgagatgaagtttcttcagtgcccaccagtcttcttggaggaaatggggtggggccagcagctggcctgtctctcttttatttattttttatttttttggtttttcgagacagagtttctctgtggctttggaggctgtcctggaactagctcttgtagaccaggctggtctcaaactcacagagatccacctacctatgcctcccgagtgctgggattaaaggcgtgtgccaccaacgcccggctctgtctctctgttatagaaagctttttaataaaacattttaaatgccatgttctctagatctctgagcatttgagggctgtctgtctgtttagtatctcagcagttaaaaacttgtcttcagtttgcctaggtctgtagttatgcaaactaggagacattgtccactgaggccaagccatccgacagtaatttagtcagcatctgaaagacaatgggaaattcaggctcctggaaaacagagcggaggtttacaccctcctccatactttataatcgatgatttttggtccccgacaatgtagtaagttcaagaccagcctgggatacagtgtgagactctgtctcaaacaaacaaacaacgttccgtctaaagggcggaaggggactggatagatggttcagtagttaagaacacttgttgatccttaaatccagtttcaaggaattcaatgccccttttaaacttccaagcaataggcatgcatttggcacatgtacatacatgcagacaaaagacataaagtaaatcaatctaaaagcaaaacttcaaaaataacaagttaaagggaaaaggaatatccatctctaattgactgtagccttgtggaaattttagtattaatgtgaataaacacacaatgtgtggaataaacaaaagagaatgttgcaatctctgctgtaaagttaattcatgcattttctcaaatagataaaaacaaacaaaaaagcagaataatgaacctcaaggaagccaagataaaccattaccaaaaagagggaatggttgataatgcctaacactgctgagagatgacaaagactcaaaagtgaccactgaatttgacaacagggggctagtgacgtagcttagtggtagagcacttgcctcaagtgcacaaggctctaggttcaaccaccaataatacacaacatacaacacacacacacacacacacacagagagagagagagagagagagagagagagagagagagagagtgctataatagaagcatatttagcatagacatcattaagccctctgaggagcacagttttagaagattgatggagatggagacatgaaaggcagtagtaggctgaagggagagaatgggacatactgcagataatacaccagactagacatattcagacggctttattattccgggaagcagacaaatgaggctgtagatagagatggcagtatgggagttattaaactgcattattttttctccatcattaccaattaacttttggattttgtttataatatttaatgcagaatagtctgccagtaaagaggttaaaagtttgaagtatttcctgaatggtttttagatttcttgtgttgcttaaagtccttacccttgtggagtttaagtaaatatcctgcccctccctaccacctttccactcccaaagtggccttcaattcaaggcaatccttctgcctcattctcccaaaagtgataagattgccagactttaaacaaatttaaatgagtatttctttttaataattgtctcccacactcctcaaatttatgacctcttctttaattattggtgtgtgtgtgtgagagtgtattgtgtgtgtgagagagtgtgtgtatgtgagtgtgcatgtgtgaatgtattgtgtatgtgtgtgtgttatgtataaacacagcctgctgggtacatttagagcattcatatgtgtatttgtttagggctgattgcttgggactttattctttttttttttggctttgttttttgtgtttgtttgtttgtttgttttgaaacaaggtcttgttctatggccctaactaaccttgaactcctagcaatccttttaccttccagccttctgaatgttacaatagtggaccaccacactttcttacatctacatttcattgttttacatagtgtgaaataaaatcttggttttccttcagacattgggccttttattaagaacccttttgggcagctggagagatggctccacagataggctgtgcactgctcttgccgagatcccaggttcacgttccaacactcataccaggcagctcacaatggcttgcaattccagctccaggaaatctaatactctcttctggattcctcaagcagtagcactcacatgtatgtgaacacacacacacacacacacacacacacacacacacacacacacactttaaaaacttaggataaataaaaatttgaaaatatataaatcatatcctcgagtgaacagacacacttttgggtttgacaaagccagtgtcaatcatgtatttgactaaacagggagaatgatatgcaattgtttgccctcttttgtaaccagtggattcccccacccccaccccgggaaactgttacatttttccacaatcagttaaggattacaggatattagcaatatgtatgtatattgtatatacaaatatatatacatacatatatatatatatatcaacaaactggctagtcagttattaatagtgtatctaagaaaacaaaattgctgttgttgttttgagacagggtctcttgtagcccaggctggctttgaacttcaatttgctatgtagtcattgctggtcttgaacttctagtcctcctgcctgtagtttccaagtgctgggattataggtatgttttgccatgcttagtttaaagtgctatgcacatttgtaaaggtgaatgagatctgtgttagtttataaagtgcactcctttatttttaattttattattcatacacgtctttctcctgcatgtatgtctgtgtaccacatgagtgcctgttgcccacagaggccagaagagggcatcagatcccctggaacagaagttacagatggttgtgagcctccatgtgggtgctctaactaatctctccatctccaaaatgtactcccttaggcaagactagaaacatttttacagccttgacccttaataactcagtcatatgttatagtatgtacaactaagcttatagcttatgaaggtttccactgtctcttgattctcacaaagggtttgggaattgcacagggtggggtagaatggttccgtgtatttaggaagtgcaaaacaagcaaaggcaagcaaccatcctggggacacactagtgtgtggctggcagctttagaattcaggtcttgggaaagaaagctactgtgtttccaccatgtaaaagcagagcctgacacagattaggccgagtacaagcttacccgatagtttttaatacataagtgtgtctatgagcttatttcagagttttccccactatgctacatggaccaatgccataaaatcaaacctgacaactaaaaccagctaatgaggaagaaatgtaggctgggaatgagagaacaggtggggattcttttctcccctccacccccagacagggtctctctgtagctttggaggctgtcctggaactcgctctggagaccaggctgacctcgaactcacagaaatccacctgcctctgcctcccaagtgctaggattaaagttgtgcatcaccaccgcccagctgaggtggcaattcttatgaggactagaaaattcaagatagaggcagcagtgtctggaaatgtcagtgtttattaaacatttaaggacatttggaagtggtagaagaaatgtacagaatgtagaaaaatcctaacaatcccctgtgcctgggagtgcaacctcttcctttccctcctattctcctgtggttttcctgttttcggtctcattattgatctcttaaagccccgtactccacccctgacctgtgaggatccatttctctctctctctctctctttccccaaatcttgagtcccagaactgtgctccagtgtggtcagagggcatcaatcatgtagctgaggtctgaggttcaggggctctgactgcctgggctggctggctctccagaaaagataaagacttagcagggagtggggaactgcaaaagccacatgacgtcatcggtcctcagtcatgggggcaagggctcagataaacaaacaaaaaaagagatgaacagataaaaaatactcgacaacctaaataaaccctgatggagagtctgatctcgatgatgtggatttgagcccaaagacaagagcatggagctgggccactgagggaaggaaaggagaggtcaggaaagagctaggggatcagctgggggcggggtgcgagggggtgggaaggccaagtggcctggagttgggtggaggctatcaaggtccctttcttctcggtgcctgacggacaggcaccaaacacacagcccttggggcaggtgaggaatagggttagtcccgaggctcctgggaaagccgaggggtaaagaaaggccagggagagatacaagaacttggaaaggaaggttgaaatgaaactttacatctcattgggaggtaagggcagggcagggctgaggagcaagaggaaagcacctagacctgggaaaagaggagcctaggtccccctgctctgacagggcctggatgtgacggtcacttgtccgagtccaggcccatcatgttcttgagggcgttcttgaggctggttctactgggggacttgactgcaggccggagctccgagctctgttcatcttttcgaagctccatctcgatgaccaccacctgagagcctttggaggactccgtcgcagacccccgaccccccgcccggcccgctaaccgctatttcttatccttgcgagactcccccagccctttagactttttctcactggcggctttggcgcttctgctgtggtccagcatggcatacagcaccggcgtctgcggggagggttgcacacatcagccccgggcttgaccttgcccacccatccctcacggctgtccccgggttctcagcgttctcctccccagcttggtgtctcactaacctgccgcccgcgcttcgaggagtccttggaagacttgtgaaatttccccttctccatggcactgtggagagagagggattgcagcggggttgctctcactggaatccactcctagcggacgcatttcctcttttcttcgtccctcccaccactgaagcagtctcggggaccctggactgcaggcggggagtcaggctccgccccttacctgagcctcctctgcagagccgcctgcctgcgcagccagcagtaccgaaccaggtagaagagcaacagcagcaacagcaccacgccgaggatgcccccgatcacggctcccaacaccaccccgtacctggtgggcactagcaggggagggaaaagaaaacacgtggtcgagggggaacagaagcctgtatgtatctgtattgcttcgcattacacctatttccagtagttagaaatgtgaggattctagccaaagctgccttttgtaatcacctcctcagcctccccagagctgagattaaaggtttgcactaccacatccagtttagttaaggctatttgcccttcccccagtctatcagtcctctgcgataccctccttgaaatgcctcccagacccctgtcccttgccccttctcacacctttttcaaagacatagagtgtgacctgagaagtcttgcccactatgtctggtgggtttttgacatcacaagtgaaagtgccattgtcgctgtagtcaagattgtgtatgacaatggagccatccttccagcgagggtcccctacccactggatgcgctctttgaaggtacccacttcgtcgatataaggttgtcccttggcatagtggaagatctaagaggaattgagagaaatggtgtgagatgaccctagtgtgaaaagcccctgaaacctggctccagtttcagggtaacagatcttggcctgtgagagggagggcagtgcactcaagcaaggtaacaaagactgttactaccttgctccagcggagtttatggctcataaaattgtttcccttctggagcccaagttctcttttctgttgtttgaagcaccctgtttgttatctaaatccaggctacgtcccccgctcctctcccacctccgtgcactcaccgaaatggcatctcggcccccttcaggctggtagcgccaggtaaaagagatgtcatctgagacccattcactggaccagaaggagcagtgcagggtcacctgggagcccacagcaccatagacttccctgtctgtgtaaaccacaatggccagggccggggaaagcactgcaagcagagggaaaggagaccagacatgaagaggatatgagaccaatcagtggtcaagggttggcttggacatgggtgaggccatagcaaagaaacaaataccttgaggcctacctctgtctggattaactcagttggtgagtgaaaattctgcattggctcaaggtctcagcataaccactgttctcaagtctacagccatagactgagtgtgtccaaccttgtctgatctcaaaagctaagcagcaggctcaggtctgcttagtgctcggatgggacagcttcttcagcacagaggaaatgaatcagtgcttttctgtaggattctagaaggtggtggtgtccaactcacactttcccttttattatctctctctctctctctctctctctctctctctctctctctctctcccccttccttctgaggcagtcttactacgtagcccatagctctcctagaacttattatctattatcttcctgcctcagcctcctgagtgttggaattacaggcatatgccaatggttgatatccaactcttctttttccaagacactctgtatatcaggttggcctcgaactcacagagatctatctgcctctgcctcccaaatgctgggactaaaggtgtgaaccaccaccactcagattatttgtttgttttaagacagggttttactatgtagtcctggctgtcctggaactccatccactttgaatcaccattaccaggtagtaaatatgctttttctatgtataaaactcaatataaatgcaataaactcaagatatatctgtacttacaacaaatggctaaatttgttttgtggatctctttaaaatataatgcatagataatacattgcattgtaattacttttttgttttgaattaagaatatacatatctgggatagcttgccttgctgactcatagatatcaatcttacttttagcaactttgttgtatttcacagtacagcaaattcaaattcttgcaataaaacagaaggaggaggaggcggaggagaggaagaagaagaagaagaagaagaagaagaagaagaagaagaagaagaagaagaagaagatgacgactagagaagactgagtcctgttgctgggcacaattgccctgcctgcctgctgcatccctggttgccattaagtttgctctttactgggaagccagaggagaaaggacatcatatcactaccataagaatctaggtatagaggaagaccccaagtccaacactcaggtgactctgcatgtggacttctgtggttcaaccatcttccctcttcttggtcatattggcccagtgccacccctatgacccacccacacaagagtcattccagggagattatgtgtgtgggttggcactggatggggacaactgtagacctttctgttccttaggagggggcaaccaaacaaagcctcattgtctaaacagtgctggaggctcatgctgcacccacgctcaccctcgtcgtcttgaatcccccacctcagcacgcagtatcttttccttacctcctgggaattctgccttagagccttcttgggaatccccaacataacaaagagggttatttattggttctgacttctgctcttcctgttatatcatcaatctttgctctcctcagctctctcggtggttctatgggtggggcagagctctttcgcccccttagactccctagcccctcattcccttaccaaggctttctccaaattcctgtcttcaccattgtcttgaagtaccacagaatagtccagtatgaaccagaaaagtctagactctgggtttacaacacaaagagttgaacttgaccaaggaaagaccttgtatttctaactgttcccccccacacacttacccctcccccttactccagcttgcctactgctttctccggatgcaaggaagcttggaagaatctacttaatttaccttgctttagtattctcttgctcactactcaatatctgccagaggtaaaggaaaaggttggtcagtttaaggaagatggctttagtgggacaagatcctaggattcactcacattatagatgagaagccacaggcagaaacccaatctaagaatctgagaccacagagggtgggttcattcattacttcatattccctgacttttcttttcttttcttttcttttctagggaattaagattgggtagctcttgcagcacttgggaatgaatggggaacagaactcagtgtttatcctgtctttcccatgcccctttctgcttcctgacaggctgtcagcatggatctggggacatctgactggtttccaacctggatgctcagggaagtgctctgtgtctctttcacggtctctttccatacctttcctgcttcctttaaaagtacacaccttccctctcctctcctaaacacagcatccccttcttgctcttgctttctggttcttgcagtggggaaaggaagaagttgccaaagagaccacctgaatctcaggcttcggggactcagtggctccacttacccaaagaagagaagagcagggcagccaggatagggctggggctggatgagggagccccaggagccatagctgggctaggggctagggcccagagcctctgtggggtggagaaagtgggggacaaggaactgagcaggattttctggaacctgcttaaaatcccctggattcccagcatgagggggctgtcctgagccagtgaccaattgcggcctggcatgtgcagttgagaggtggtggggagggtggcagggggcatggagcagaaggggcattgtatactctgggtggaggggtggggggatacataccaccccatacacagagagctttgtgtataatgacctccccctaccctaggctggaatgttggggggggtgaaggagagggacagaaaaagggacacagacacacttctctgaggaatagataagccaagaaacctaaatcccaaaggccatgcaaaggattccttcttagcctccttgcctaagagccctgggacctagatgcaagttttttttcagagaattcccaaattagggtgtcccttgttgttctgattgctacagcaacactgtagactacttgagacgacaaagccctttgggaacaactttttccatctccccgcatcctaggaggtgctacctagatagaagcttttctttagttaggaaacctttcaatgccttatgccgtgctgcagtgtacataagtaaaggcacatattgtcctgtgtgctggccatttggaaagcatgagaacgccggtagtagactgctaagtcagttcttcctgaaagctcaaaatctagtttgaggaggcagaggtgagaaacagaagacaagctcgtcaacagccaatgaacagaatgctgggaataccacacacagccaaccactccctccctcagcaagatttggttctacaaatcacttaatacatgaagttcagaggaaagagcagtcaggttatatgggaagcaatgttatatagggaccttgaaggagacgtgccattttgaaaaggggtacaggagggacagtggctagatggaacagcaaagagctgaggtgaaagtaagtcctctctctctctctctctctctctctctgtgtgtgtgtgtgtgtgtgtgtgtgtgtgtgtgtgtgtgtgtgtgtgtgacatctgtgaagctatgtgcatatttaaagcagattatgtacatctttgtttgttttgatttgggggatcttaggacacagtaggacacaagtctgaaggtctcaaatgacagactaaatagggtggatttaacctagtgcacatcttacagcatctcctcaagaattgaattagggtgtgggattaggctgtagtttacgcctgtcttcgtagcacttgggaaggggaagcaggagaattaggagttcaaagctagcctggcctataagagatcatctcaacaaataaaacaaccgaccaaccaaccagaaacaaacaagatgttccaaatgtctacatgaccagagttgaggggtttttatgatttgtttatttttacgtgtataagtgcttgtctgcatgtatatgtgtgttccatgtgcatgcctggtgatggtaggagccagaaaaggagctcagattccctggaactggaatggtggtgaaccaccatgtaagtatttggagctgaacacaggtcttccagaagagcagcaagggcttttcacctcaggccccagagctgaggtttgctatttgtttgttctttcaggggacagcatgggaacagctccccgccccaccacaaattatgtagttaacaaatctggtgagcaaaaatcttttagcgatatccagatagctgcctcttttttcttgccttctttgggtcatcggaaatgattgtgcttttcagcaaaaatgcccccagctcctctccttcatttctcttatttcgaatcatagaccttgctttatcgtgcttatttttaaaggaactgtgttgataaaagagtttggcttgctaggtgtggcggtgctttcctttaaccccagaaggaggcagaggcaattggatctctgtgagtctgaggacagcctggcctacctagtaagttccaggccagccagaccctgtctcaaacaatgacaacaacaacaaagagagttcagtttaatatctgaagtctgaatttcttttttctttctttagatttatttatttggctttgtgtgcttgatggttttgcccgaatgtacgcatgggtactctatccccaggaaatggagctatgtatagccaccatgtgggtatttgaaaactgaatctgggttctctgcaagagcagtgagcacctttaaccactgagccatctctccagccccatggtctgaatttcaatgtgatatatttctgtcagctatagtgtaggttctggaggtttagtgcaatgaccattgtttcagattatttgcttatacaggatctacctatatactcctggctgacctgaactcactttttgtttgtttttgtttttcaaatcaggctttctctgccctggaactcaatctatagaccaggctgtcctcgaactcacagagatccacctgcctctgcctcccgagtacagggattaacggtgtgcaccactaccgcctggcttgaactcactgctttgatcagagtggcctggagcctctggtgatttgtttctgctttctgagtgctggggttgtatggcctcctcaccatgctcagtttggtcctgcatatgagacattaagccaacagtctcttattctttccatgcatttcagatcacagttcttgtgagtttcgtggttaacactagattttggtaatggaatgctaaatagaggcttgattataaataaacctcaaggacaaaagtcattgtgagctcacgtttagaggaagctgtaatcagtatttccacttaacttcactaccttccactttctctctctatccactactcttatctataccttgttttgtgggcttgcatgtcctctctttcgatctctctctctcctctctcttgttccccccccttctctctgcctccaacttgttatgtaggcagggatgacctttgaatttctgatcctcctatttacaggtcctgagtgctgggattacaggtgtgcactactgtgtctggttttatgcagtgctgaacctaaaaaccagggcccgtgaatactaggcaagcattctaccagctgaattgcatccctaggcttactactttttatatttgtttctttattgaccttgttaagactgtaagcttcttcaggttgacaggtcagtatattcttgtgtctttgaatctcctagaagactttcacagattggcaaaaagtcaattgtacatataggttaagtaaaactattaaaaggcttaagtgatggggatggagaaatggctcagcaattaagaacactgactgctattgcagagcataggggttgatagcacctgcatggatcacaggtctgtaactccagttccaggggatctggcaccctcttctggcctcctggagcacaagtggtacacagacatacaaagcaaggaaagcactcatatacattcaaacaaacaaacaatcaaacaaaaaaccagaggtaagttaaagagacattcattacattttattgcttttgtttttgagatactgttcatgtagccaggttacctggaactcaatatgtagctaaggatgtccttgaactactgatcctcctgattctacttcctaagtactaggattgcaggtgtgtcaccaagcctgggttagagggatcaagatcccaaaattgtatttactagaacagttttctattaattaacctgtttactgaacttttaaaagctgttttgttgttgttgttttgcttttcctgtttactaaatgtttagaagctggagttttgtttgttttccttttcctgtctctggaggctggcttcgaactcacattcttcttactttagcctcctaaatgctgggactacaggcaccgccaccactcccagcatgcaacttattttttgaggtatccggcattaaattgtgttgcagccatcttgaaggtcaagaaacgcagcaaaagagattcttgcgctgggtgttggggtctcacgcctttaatcccaacacttgggaggcaggggcagacagatctgtgagttcgattctacagagcaagtgccaggacaggctccaaagcaatacggagaaaccctgtctcgaaaaaaccaaaggaagagagagagagagagagagagagagagagagagagagagagagagagagagagagagagagagagagagagagagagagagagagagagagaggaggagagagaggagagagattcttgcacaaaatagaaggttggatgaaagaacttctaaggtcccttccagtccctaaagtctacgaaagtactttctttgtcaaacgttacagaaataatactattcatttgatgcagggggaaagcgaatttgtgctattttaatcgtgtaagggaaaaggcaggagaatgctagagtgctaaatataaatgggatctgaatattaatacaaccaaagagatttataatagaataagttgcactgccccccccgccccccctttattcttctccctctgccccgccaccccacagctcccagggtcaggaacttcggcattctgtttcattcctttctcacttgctcactttctttcctcagctgagagagctctgcaactgatttctgaacttggattcctcaaaatcatttatatacagcatatataaatcaaagtgggttctccacgccccaggttcttgtggctgtgggtgtcacccacatatcgctgaaaaagaaacaagggagcgttgtctttggccagtgggagtttggttcatgcagcggcagctcaagccctggaattgccaggcctaatgggggtggtcagaagagggtccctgaccttgaaaataatggtgtagagaaagagaagacataaaacaaacaaagacacaaaaattaaaaagataaaaacaaaacaaaataaaaaaacaaaaaaaaaagagagagaaaatactgttgtaatctgacagccccaccccacactccctactgtccaaactggggttcagtgtgcttatctcgctggggacatagcttgaaaatacagtgcttgcccaacatctctttagggcccaagaacctagaggaagcccaaagtagccttttccttgagggcctcggtcagctaactcggagatttttggacttggaaaggaaggggttgaagggagctgccgaagtcctcggtgactacaccgggggaggccgctgtctccgggggagagcgggcggtgcaaaataaaacccgcggcgggtaaatgcacgagccagaatcacgcggggcgacttagccaaaactttgacaaacgacgctagaaactagcgcgagagaggaaaaccagagaaaaatcaccatccacaaagggccgaaccgcaaaacccaggggaggttccagcctggagcggggagagggggacagacaaaaaaaaaaaaaaaaaaaaaaaaccttaactcgtcacgtgacagccctgtccgttgctccgctaaagggaggggggcgggagggctgtacgtcatttccgtccaggccggaactcaagatggctgcgctcttgctgaggtgactttagcctggggctgggagtccgtgccccgccatccttggaggatctgaagtggtccctcggggtggtgacagcggcgtgggcgcgcggggacaggggaaagagccgcgggcgtgcaggccgcgccgcagggatcctaggcctccccatccccgggctcggaagggcttagaggtcactctgtgtggacgagtggcccggctgtcaccctttctgcttcgcccacgtctaaagcctcttcccaaattgctcgtgtcgtcccacccaggtcggagcctccagaaactcactccgagatcagttgtctcctaggcctacggtgtggcggagggcggggctcctaacccctggcagttagttctgttgctgccacgcgtcgggactgtggcttccaaatgcatccccccaccccatgccagggttagcagtagcggccgagtgggtctctgctgctgcccagaaaatccactttgatttgttttctgttttggtttagcgttgtgatggggtgggtatcccgccttttccaacagccaatttcctggccagagaaatagcccagattttcttttgttctgaattcttcactctttaggtatcattcccagaaccttaatagttagttgtaagggctggtgcccttcgacacttacggtacaaatcccaacacagttttgtgcctgtcctatttttggaaatcatttgttatggaaagttagcttcagtgctgttgaaaattccagtcccagattctcccaaatgtgttttcatttctctttccacttcagtcatgcagtataaaaatagaaagattctgtttagtttttctttgttacaaagtgagtctttgggagctcggatcagttatctttatccttcattttcatcttgctgtgcattttcataggcatcttttctctgagatgggacaggtccgggttatccagacctgcatccttcattgcatatggtcataattacttgaccataattgaatgcttgcagattctttgatgtaatacatgttaatgaatgttagggcctgttgggtggattactaacatttatcatgaaataatcatattggttccaaacatttcattttagaagtttcaggattagtgtttagagtcttcatctttgggttcttcctggattcaaccagtctcagattgaaaatatttaaaaagcaaattacaaaaagcagttttgaggttgttacctgatgagtattatactgagtccatgtgagtgaaactgtagatataccctgctgtagccttctgccattcagatattccttctcagtccagcacttattgtttgcttcaccttttattcccttgtaggcatgtggttagcggtatctgaactcccattggttatatctataagtaactttttctcattggttgtatttggactgcacatagggcacacccccttccttaatcatatggtataacatatatggaacatataaattatattgggcatcaaagtaatacaggaattattggaagtaaaggacagtgcataggacatatgtaaataccacaccgtttcatataaatgacttaatcatctgcttgtggaggctcacaccatagtctcagcacttaggagactgagacaggaaggattgctgtaagattgaagccagcctgagctatagagtgagttccaggccagcctgggacacagagtaagatcctgtctcaaaacaaaacgcttctagctatacccttttacactttttttttttcacttttctttattgtgattgggtatgtatgtgccatggcttgtgtgtagaggtcagaagacaattgtgaatcctgagggtccaactaaggctgtcaggcttagtgacaagtgcattcgctctctgaaccatctcactggctcctagctgtaatattttaaactccattcccatcatggaaactcttttcagactttctggtttcacatgaaagaccaggatagatatcttctttcatatttcaaataaggttgtggaatttatacagcttgtttctgtaggggccttgtgtaaagcttacattggtatttgggaaacaatagcactagacagaacttgcgatagattccaacccacatctgcaaactcttgctgggtagctgagtgactgggcctagcttggtgtgaggaatgtgtgccctgcaacttcagagacaattcagttgatttaaagggatttgttcccacttctttctaagagccctgggtacacaatgtctgcattcacctcttgcctctgaagggaagagagagacgtgaacaacggttggttgggttttttcccttcgaataatgggcccttctgagactctgttgtacatcgtcaggctcttgaaaggattgtgggtctagaatcagtgatgtaatggacatcatgaacccatttagaagacggttggatctttttgtttgcttgtttgattttttgagtcagggtttctctgggtaacagcccaggctgtggtggaactctgtgtgtataccaggctggcctcaaactacagaaatctgactgcctcttcatcctgagcactgggattaaagatgtgcaccaccacccagctcagattgttggatcttaatgagctcttatatctccacaatgccttacacaaagtgaataactagttacatagaattaacatagggaaatgtttggacttccagaacttcattgtggtcacccccttaaatgctttggaagtgttggctggaattaagagattaaaggatctgttgttgaatgtttttcctttctcattttccattttggctttttggacaaggtcttaatatatccctggctggcctagaaatggctgtttagaccaggctggccttgaatttacagcactcttcttgtatgtcttcctgaatgctgggattacatgattacaagcctgatttcctgaatttgatcccaggatctacatgttagaaggagagaaccaactcttagcaaattttctgattcccacatgtgtgttgtggcatgcaccatccatcacacacaaaataaataaaatgtaattaaaaaattttaattttatatattttatgtgtattgctgttttgcctgcatgtgtgtccatgtaccatgtgcatgcttggtaccttcagagtccagaaaagggcactgggttttctggaactgaactatagatggttgtgcatacagtgccggtactgtaaaccgtggtcctctagaacaacagccagtgctcttaactgctgagccatctctccagcctatgtaattgttttaagtagcaacttttaggtagaaaacataattattttttgtaaatacttttttgtgggaatggtaaagaatatttgcttactcatgtttttatactattatatgaaaggctttgtgacttaagtttatctttgctatctcgaagttaatggtaggtctttaatttttttgggggggaggtattttgagacagggtttctctgtggctttggaggctgtgctgatactagctcttgtagaccaggctggtcttaaactcctagagatccacctgcctctgcctccccagtgctgggactaaagtgtgtgccaccaccacctggctagatttttaattttttgtttttgtttgtttgtttgtttttcgagacagggtttctctgtgtagttttggagcccatcctggcactagctctggagaccaggctggcctggaactcacagggatccgcctgcctctgcttcccaagtgctgggattaaaggtgtgcgccatcaacgcctggctagatttttaatttttaaaaattaattattaatattattgcatggtgtgtgtgtgtgtgtgtgtgtgtgtgtgtgtcagtcaaagaactttgaacagttggttttcttcttccacctttaagtgggttttgtgggattgaactcgggttgtcagggttatgttatccactgagccatctccccagctccagatggtttttggagctcgggaatttttgaaatgacctagtttagtattaggaaggtccatcctcaaatcccttgttcttcaaaaattaattcatccgtttggagcaggtctctgccatacataaactgtgtgcttcccgacatctcttactctggcttgttttgtttttgcaatgcttggggattaaacccaaaacctcatcctgtgaatgttaggcaagcactgtaccgctgagctattaaagtcgtcccccccccccccattaaactcctgtgttttatttaaccacctcctttaagacctagctttaagacaacatcctgaagattaacgtggaatcctagcacttgggaggtagaaacaccttagctacatagtaagtttgaggccagcctaaactacttaagaccctgtctcaaaaaaacacacaacagatttgtttctgtataatattattggatctcattcttttttattttttaaagatttgtttatttatcatgtatacagtgttatgactgcatgtatgcctacagaactagatctcattatagatgcttttgaggctaatgtggttgctggaaattgaactcaggacctctggaggagcagccagtgctcttaacctctgagccatctctccagcccagattggctctcattctttcacctagtatttgtgttcatttaagacttcattttgtaatgtttctgattattcttagagttatagttttattattattaagagaggatcttgtagcatatgctggcctgaaaattgctgccctcctgtttcagtagtataactgctggaattataatcttattaccatgcccttctgagttatagtctgtctgtccttcctccttccttcccttccctctctccttctccctctctccctccctcccttccgttttgaaacagggtcttgtgtaacccagactggcctcacactcagtatgtagctgaggctgttcttgaatttctaacctttctgcctctgcactaagtgctaggatgacaagtgtgcttaccatgcccctcttcaagttgtagtttttcagctagaaactagggacactatacttatcttctttaatggttttgatgctggagattgaacccaggacccaatgtgtgttaagcatacattctacactgaattataccctcatcgctcatttaattttcagtctgtctttccacatctaatataatacaaaggagccaggcatggtagcacatccctttaatcccagcactctggacacagaggcaggtagatctctgagtttgaggccagcctggtctgtggatcaaggtccagcgcagccagggcactcagagaaaccttgtctcacaagatagaaatatataaataataataataatgtaggtggggaagttgataggctggggttggtctctaaatttgtattcttgaatctcttgtagacacgttggccgtcattgcctccgagcccaccttaattctcagatctgtctcagaaagtaagttttgaagcctgttgcggaatattcctttacactgtgtgaagatgggtcattgtgattggtgtaataaaaagctaagtggccaatagctacacagcatttgtagcagggactcctgggagaaagagctctgggaggaaaggcagagcttccagccagatgttgagaaagcaggatgggcagtccagagtgaaggcaactgagccacataaaaacacagattaaaagagatgggttatgtgttacaggtgttctgcctgcatttttgtctgtgtactacatttattcagtgccaaggaagccaattggattgcctgagactggagttaattactgtttgagccaccatgtgggtacttctgagccatttctacaccctttttttttttttttttttttttttggtttttcaagacagggtttctctgtattgctttggaggctgtcctggaacttactctgtagaccaggctggccttgaactcacagaaatccgcctgcctctgcctcctgagtgctgggattaaaggtgtgcaccaccaatgctcggctccttatccttttttaattttttaaaatatattttacttattaatgtgtgtgtggtgggattcagggatatgtaggtgacagaagatatcttgtgggagtggtttttctcctcctgccacgtggtccagagagaccaagttcagctcatcagatttgtcagccagtaactttcctcactgagcaatcctcctgctctcgccatacctttctttaaaaagacatttaggggctagatgggtggcactgtgtaagagccatgtcctgctcttgcaggggacccaaatcagttgctagcacccatattgggtagctaaccctgcctataactctagccctgtgggatccaacatcctcttcaggcctcctcaggcatctgcattaatatacacataactaaaaataaaatgaaactttaaaaatactttttgctgtgtaaaatatgtactttagtcctttttgaatctcttgttttactttagtgctgttcctttgggaaccacagccaaggaagagatggagcggttctggaataagaacacgagttcaaaacgtcctgtttctccccacctcactatctacaggtgaggccctggagccagatggtctagagttagccttattttatttttctaaatcttgaatacagtgcatgggagcagtgggctgggtagtaatggcagtgctgtctacattagcatgcagctcctgatctgtgggttgccagtgggagagtcttggaaaagtctgcaacaagtaaaagatttctgaatgcacagctgccaaagagaaaattcaaaagtgtaacaaaagcagacaggccatgagtctgaggtgtttctgcgattcctgcctggttctgagcacacagcgcacactttgtactgtgtgttgctatcacaccacacaacactcaatgctgtctacaacacctctgctcagatttgaggctgtgatgctttgttttgtaattgtagtgtttttattacacacagagttttctgctcttagagaagcctaagggtttaattatgggaaacagtgacttttaatacttttctgttgtgattcctcagcagttaagtatcaatatctctagcattggaatgtattaggctagaatgtttggtcttaaaaattgctgtttgaagacggaacatggtggcacatgcctttaatcccagcactcggaggcagagggaggcagatctctgtgagtttgaggtcagcctggtctacaaagttagttccaggacagccagggctattccacagagaaatcctgtctcaaacaacagaaacaaaaccaaccaaaaattgctgtttgaggctgatcaaggtggtacagttggggtgttgagacaggaggatcgggagtttaaccccatcctcagttatgtagccaatacacggccagcctgagctataaaaaaacacacacacacaaattcatacttttgtacttctgttagaaatgtgacttgttccattcagctgaagttatcaggctgagaagatggatcagtaggttgaggttcttgcggctaagcctaacgacctagtttgatcctctggtcccacccacatggtagaaggagagaactgacttccaaaagttgtcctttgacttgcattttgtgtaccatggcacagtaaattaataaactagatatattcaaataaataaacatgttaacagaggctgtgttcttttcctttggctctaggggaaatttgttcttgcagcttctggcttctagaggtcacgtacatctcttggcttcgtgactactaatttagttatttattggtattttaaatagggtcttatgtaactcgggctggcttcagattcagtgtaactgaggctgaccttgactgttttatcctgctgcttccccctctagacaggttgagtgccaccatacttacacttatttctttctgtggggcaaaccttgctttcttcaagggttcctattttgtacaaaagttatactctttttcagtcattgtttatgttgatgctccaattgttctagctgtggctattaagagttcttcaatatggcatcagtattggagtgttagatgtgctcattgctacaggcgcatcattgactttttgtcctctcatcattggatagaacatgatatatattgtgtttgaaacctcccccccccccccgtgtgtgtgtgtggggggggctatggatggatgtatttatacatccaaacatatatacatgtttgttcatctcttgttttcagaagtagaagtgctagctgattttgtttttgtcttctaagagaattcctgtgaatctttttaaaaattaaaaataaataaacactaactcagcaaagcatctgccctctttacttgggttcctgccaggggatactggccatttttttaaccacctccacaaataccacaacccttcaggatttttttccagctcagattccagaaataatttttattgtagaaactggacattgtaccctaccagaaggttagtaaatgatcttagtattctgtagtgaaatctttttaaagacaaatggtaagagcttgtctcaaaaatgagagggggaattggaaggggatggagacaattccaaataggcctggtctttctttacaagtcatttggaaaaaagtgatgttaggtccatttatggaatttctcatgaaaaaaagaaacagaaggaaatgtggagctattttctaaatatcaaggaaagatgtctgaagtagctaacatcatacattttttttctgtttgtttttttgttgttgttttgtttgtttgtttgtttgtttgcagtagaatcctatatagtccagactgaccttgaaatcttttaagctttttttctttttcctgacacagggtctcactgtgtagccccaggttacaaaattgctttctagttgtacaagctctagtaggtaccaatatgggaaccccagtgaaaagagttagagtagtatctatttcctcttctcctttttttttttttttttttttttttttttttttttttttgagacagggtttctctctgtgttgtttaggagcctatcctggcactcgctctggaactcacagagatccatccacctgcctctgcctcccaagtgctgggattaaaggcgtgcgccatcaacgcccagctgtttcctcttctcaatggtagcagtgatttggttttgtaaaatcaagggataactttttttttttttttaagatttgtttattttttatgtatacaacattctgcttccatgtatatctgcacaccagaagagggcaccagatttcataagggatggttgtgagccaccatgtggttgctaagaattgaactcaggacctctggaagagcagttggtgctcttaacctctgagccatctctccagctccaagggataactttttaaaaaagatttatttttatgtgatatgtgtaagttttttttgtttgtgtgtatgtatgcatgcatgcatgtatgtatgtatatacgtatgtatgtatgtataccacttgcatgccctgtgcccacggaggccagaagaaggtgccaggttccctggagctgggttacatgttaatctgtgctgggaactaacctctgacctttgcaagtgttcttaactgctgagccatttccacagccacaagagatattgtatgtttttacttacttctttactttttctttgtttttcaagacagggtttctctgtgtacctctggctgtcgtggaactcactgtgtagaccaggccggcctctgcctcaagaccgctggaattaaaggagtgcaccactatatctggctttttttttatgctttttaaaataaataatttttcttgttctttttttgcagtggattgaacccaggttctcgtgtatgatacataagcattctatctctgagctgtgtacttagtcaaatttcttatttttaaattagaaatagaaacatgaaaactaggtggagttttcttggtttttgtttttaaggatttattttgtgtgtatgaatgttttgcctttgtgcatttgtatataccaaatgtgtgcttggttccttggaggttagaatgcttgacaggcccccagaactggagttacagatggttgtgagccaccgttcaggtatcaggaactaaaccaagtcttctgcaagagtaataagtgctcttaactattaagctatttctccagccccagatggttttggttttgattttgatttttgtttcgttttttaaattatgtcatcctaaaaaaaaaacccaaaaaacaaacaaattttaaaaaaattgtctttgtatgtttctttgtagatggtctcttcccatggtaatgtccatttgccaccgtggcactggtgtggccttaagtggaggtacgtatgtggatttacacatgtgcacacatgcacacacagatctttgaagaactgctgtttttctgacttacttccttgcctcctttctccctcagtaacttgatttagagtgaatgtaagtccctttaagattgactgtgttttcaagatagagtttctctatgtagcccatgagagggtcctggaactctctctgtagaccaggctggcctcgaactcacagagatccacctgcttctgcctcctgagtgctgggattaaaggcgagtgccaccaccaggctccctttaagcttttcattaattcattcctttaacaattaattatgtgttcccatgtccccatggtactcagtagtacttgctactcttgtagaggactggggttgggtttggtcctcagcaccgacatggtggtccacaccatctgtaatgctagttccaggggatccagccccctcttctggcttctctagacagcaggcccacaaatggtacacatatgcagtcaaaaccccatacatataaataaaataaaaataaatcttttaagagtaattaaaagaaagcaacagtaaccaggtagctgttatcctgtagaaaatgcaccaagaattccaagctggtcatggtggtgcacgcttttaatcccagcactcaagaggcagaggcggacggatctctgttcgaggccaacctggtctacaaactacactgagaaaccctttcttggggaaaaaaaagaaatcatattctcagccctttgtacattgtgagtactttgttttgttgtctgtattcccatggtgattagtgtaacagtgctgtacataaagataacagggtactaccaagccaagttttggtggtcacttgaacagtcttcccagggttctttagatgttttcatttttgttgcatggttttctagacagaagtgcctaccaccaccatcaccattgttttattttttgaggtttttttaagtctttttttttttttaaaaaaaaaaaacaggttttgtgtaacctaaactagcctaaaatttgatgtatagcccagcatagtcctgagcctttttttttttttttttttttttttttaagatagggtctcattatatagctctggctgtcctagaatgtactttgtagaccaggctggccttgaactcacagaaatcctcttgcctctgcttcctgagtgctgggatccaaggcctgcaccaccactcccagcagtcctgaacttctagtcttcctccctctctctctcaagttctggaattatggacatacgctaccatacatattttgttttgttaatttttttacatttatgtgtatgtggttttttggtatgcatgccaaatgtactgtgtgtgtacctggtgcccgaattggccagaaggcggcattggctctcatagaactggagttacagatggtgttaacaaccacgtgggtgttggaaaatgaacccaggtcctctgtaagtggagccagtactcttaattgttgagccatctctccagcctacatgttttataaaatatatttttattcatattatttttaattatgtgtatatatttgtagggggtgagtacaggcaccctcgaaggctggaggtgtttattcccctggagctgaagttacaggtggcatgagttactcagtgtggttttggggaaccaaactcaggttctctgcaacatcactatgcacttgtaattgctacgccatctctccagtctcctatgcatggcttttatgtgatcctagtttcaaactcagggcttgtatatgttagccaagtattttggtagctgaactatgtccctggcctacgttttctctatttcaaagtggtttagaattgaatcaggtgtcaagaggggtcacagaacctagtttaatacattacgttacttgtaattgatgggaggcttgcttttctcgcaggggtctctctttttggcctgtcggcactgctgcttcctgggaactttgaatcttatttgatgtttatcaagtccctgtgtttggggccagcattgatccactcagctaagtttgtgcttgtcttccctctcatgtaccactcgttgaatgggatccgacacttggtaagttaattgtggatttgtacatttcctggataaagggattgagaaggctgggagggtctgcgcccttacttgtaaggtagtgttccttcacctttttcttcctcccacgtcctttttgatgctcgtgtcactgaacccaaggccttgcacctactatacctctaactttagagctattctttgtttgcttgttgagacagggcctctcactatgtcaccctggctgttctggaatatgctctatagaccagaatagccttgaatttttggtatcctcctgactctgcatcctaggaattgggttataaatgtgagcaccacacatggcccaaccttgtcttgctgtttttattaatctatttattattcatacagtgatcgaggggcttgagctcggattgtaggccttttcctgagccatcttgccagccctctagtactattcttaaggctgattgtattggatctttactcaagtctttttggggagaactgaacaaggcccctcctgcattcctttatgagtgtgggttaggccagtactgaaagggatctttgtgaactttcccacttttgagcggcatataattattaaaagacccctgaaagcagctctggcaacgaagacatatctattagatagagatgaactggtgcctgtgaatttttgacaatgggaatttaattgtgagctagataagcagttactgctttccgtgtaacactcttttctaccctgagtgacaagtctggatagactcaagtatcctcacttgagattgtattaagcaactggagagaatgagagcaaacacaagccaggtgccaagggtggtttttgtgcttgttgttgttatggcttgttagtgtgctcctgggaactgaacccgggctctggtccatgctaaggaagcactctgctacatagctccatctcccatcctttgaaaacactgtttatcaatttaaaatttatttgtattttatctgtatggtgtgttgcctgtatgtatgtctgtgcaccaaccatgtgcatgcctgggacccatggaaaccagaagagaatgtggtaatgagccaccttgtgggtgctggaaaccacacctagatccttgagaggagcacatagtactcctaatgctgagctgtctctccaactcccttttttttttaaaggtctcatgtcatgtagtcaagattgacctcaaactcactatttagccagaatgaccttaaattcttattctcccacctctaactccaaattgccaactgctaggattataagtgagtgctaccatgtctagtttatttgggctttttgagacagggtcttataaaacctaggttggctataaatttgctgtgtacccaaggctggctttgaacacacccaaattactgttatattttcagacggagctttattgcctaggttgccctggtcctcactctaaccaggtggaccttgaactcatcttctgcctggcaagtgtgagcattttaagagttcatattttgtgatccctactcttatatccttctccagtaaatagttaaaatttatttttccactcttctgttatttctgaaccaaagcaaaatgtcagttggatgattttgccgtagtttggccttttataacctccatgtcagagccagcctcagagacaagtatcttaatgatttcagtctggtccaatagacagctgaatgaaacaacaaccagagagagagagagagaggagagagagagagagagagactaaataatctattaaattaagtgaatttatcaagtgttccctagagcagtgttcagtttgatttgaagtggcttctgtccctgagggagaaagtggagaggaaaggcagttttattgatggctttgactccgaagaacaaagctgggcgggcgggggggggggggggggcggcggctggagagatggctcagccattaaaggcttggctgaaaccaaagtgcagtaaagaaaatcatctggaggcttcacatcctggctcaggcgggggcttacttctgtctgtttttgtcttaatatggagttggactttggggtcacctggcaatcctagaactcaggctttttgccccagttcctacccactatgataatctctttgttgagataagtgagccgcctaaaggctttaattaagcaagccctaagttttttttttttctgttctccttcttacaagctctggatgagggtcaggctttaatttgccacaagattgtgtatcatatcagttgcctggctggaaggtctaccaggacagggaaatgctatagttataaaggaggaactgtaggtcctttgacctaccttccagaggcttctcctaccactactacccagcaggactcggtgcctctgtgagcaaagccactctgtgtgggatctgcccaatgcttcatgtcatctaggtagaagctagccaggcactgacgtgagcatatcctctccccttgatttctttctgggcttcctccagtatttctctgcagggactcctgattgagtcagttttatggtcagactatagaggttcctgtgttagtatatgttgaggctgctttgtgtgctgagtttcaaacctgaacactgcttttcacctcagagcagtgtggttctcaaccttcctaatgcttcgaccctttaatacaattccgtggtgacccacaaccataaaattgttttgttgctacttcataactgtaattttgctactgttatggatcataatgtaaatatctgataagcaggatacctgatatttgacccctgtaaaaaggtccttgggccccacccaccacaggctgggcagtggtggcgaatgccttaagtcccagcacttaggaggcagagacaggcagatttctatgagtttgaggccagcctggtctacagagtgagttccaggacatccagcagtacaccaagaaaccttggagggagagagggagggagtagttctcacaagttgagaactactgccctaagtgttcacagcctgagagagcatgagagtctaggctttggttttgtttgttttctttttggtgcggaggtccaactcaagttagacataataaaaggcaagtgtcttaccactaagataccccgttcttcgtggacaaccacttagtgcttagtggattgataccaacaaaaacagttgaagactgaaaagaaggaatttaaatgttcataaatttgtactatatatatgtttctacttgttccaatttaaaggatattttagtggggtcatagtaaaaaaataacttttgagagtcaggcatggttgaaagtgcctgtgatcccagctgtttaggaacctgaggttggaggatgtcgtgagcccaggaatttgagtatatcctgggtcaatatagtgaagtcctggatgggagagaatgaaagaagaaattgaaagttacggtcctgctgggagcagtggttcatgcctttaatcccgtactcaggcaggcagattcctatgagcttgaagccaatttggtttacctacagaattccaagccaatcagggatatataggaaatcatgtaaaacaaaacaaaaataccaaaataacaacaaaaaacccacaggctgggcagtggtggcgaatgccttaagtcccagcacttaggaggcagagacaggcagatttctatgagtttgaggccagcctggtctacagagtgagttccaggacatccagcagtacaccaagaaaccttggagggagagagggagggagggagggggggaattaaaatgaggaagatagatagctcagttggtagaatgcttgccttgaatatacaaagccctgagtttgctccccagcaccagataaactgggaaatgtaatcccaacattgagaaggtagaggcaggaggatcagttcagggttttccttgactagcctgggatccatgagaccacctctccacagagaaggagggaaggcattatcagttgttgatcccagaatacattcgtgaaagtattagcctttgaggacacactccctaaagaattctgtgattgactctactggagattctcaggctgcgttagggaattgcttgagaaacttgcaagttatgtgtttaccaagtttatgtcagcacagaactttaccacttccacataatgccctccactgtgcagaaatatgtttgggccagacttggggcatgcccataattccagcactttaggaaatttaagcaagactatcttgagttgcgttcaccctgggttacatggtgacttctgggctagtctggattatacaagattccgtctcaaaaaacaaaactatgttttgaaggactatctttctggaaacattgatctaagtgtgctgtcccatggagggaggatgttttatctgtacagtctggaagctgtgtataaaggcctttggcattctggagcacattcaccgtcatatcactaccacatgagaggacttgattttcagtcactgggggagtggtggtaggtaggtactgtattgtgacttttagaagagtgaaattgggtcatagggatgtagtacttttctctggaatcccttataagggagatacctattcatcaggaattacaggaatgactggggttctaattactaaaaataaaaactttccctcttttattttctacagatatgggacctagggaaaggcctgtcgatctcccaggtctatcagtctggagtggctgtcttgatgcttgctgtgctgtcctctgtagggctggcagccatgtgaagagctgaaattcccatcatcgtcctatacattatcacactgatttatattcccatttatcactcttatccccagtcaccaaggttcccctgatttgtttagatgccatgtgcttcagatcccactggagctcagtagagaggcttgaagacctgtagtagtagaaaaaggtcattttccctgggcctggagcccttactcccaatccacatttgactttgatttgtgctgagggtcagctttcgactccttcttgctgagacagtggaaacaatggcagtcctgtggctgcccttggtgccactgcctgtgggctgctggcttaaaggacagttcggttcattggtcagctcagggcctttagcgcccacacagtgtgcctgagagaagagaggtggagggagggaatggctctgcccagctagagggagagaaagagcgagttggatctggggagctcatgcttgggaaaagatatagatggagcttttgatggatgaggaagatccaatgtgttttctgttctgtttttcacttctagtaaaacacacctttaatgtcatgttttctaatctaaattcttgtaccatcttctttggaaatgattaaaatacttctcatttcatgtttcattctttgaaatctggtgagggttactagaaaggatctcatttgtgccccttcctttggttcttgggcatttacacctaaagtatgacttcctagaatggaaatagtttgtcctacaactgaccactgcgggggagggagagaacttgaggtaattacatacaagtagtgaaaaggtttaggtactacaaggaggcctcagagaagagcagagatggggcagctaagcatgttgagaggttttttttgttttggtttcttttttctttagcccaggttttactgttctttagcccaggatggccttgtactcctagagatctgcctgcctctgcctcccgagtgttgggattaaattcatcattgcctagctctgttgagagattttaaggtcttacaaggtcacttcccatcctgtggatatctagctttatacttcatggtacagttcagcagatacttcatttaaggacacctagcaccagtggaggtgacagctgagggctaacgacctacaggcgggagggaggtttgggggttagagagttttttaaagtggagcagggttgtgggatgtcagaatcctagaaaatatatataatgggaaaacttgctattttaccctattgggactctgaatccttagcaggagtgctttgtctttgttgccaggtcctgtacatgttaacaagcactgtaccactgaactagtcccttagctaggagtgctattttgatattttttccagctctggaataggagagtcatcttgggactaggtatttggctccatggtggtatgcacaaagccaatagtttaattcccagaccaggaaaaacactactttaagagatcagtataagcagtggattggagaatggcatagcaattgaacaggacaacagcatgaactcagtgatggcagtgggggtggggtgaggatgagaaagggcctcaccatgtatccctgactggcctagaactcttaacccaggttaccctccagttggtgagatactgcttttgcccgagtacatgttaccaccactctcagctctcggccatctctattcctgctcccaagtagttgttggccttaagtaatgatcccttgccccttgtctctagacaggccctggggagtcttgtgttgctagggattgtttgaacctaagggccctttaatgctaggcaagcagagccataaccccagcccccattttttgttgttttttgttttactatattttcactttgagacaggccttaccaaattacttaagaccaggtaggtcttgaactgatggtacctgcttcagccccccaagtagctggaattgtcaccacatctgacaatcctgggaggctgtgtagagtccctccagcttgagtcagctgtctcctaggttgttctttgagtagggtcagtgttcatggggaaaagcctttggctttagacttggcaggggcataaattaacaaccagtgccagaaagatgcacagcgggggcaatgggaacagatttggagctgggagatggatggggccttctaggctcctgctggcttcttaaccagctagtgattgaagtggagcacctggcttgctgctttttctacttctgggctgatgtgtctgaaatagcacagtgggtatatactccaatcaccaagcccgaggactggagttggatccccaggatccacgtggcaaaaggagagaaccaactttctttcagcctccacaagcttgaggcatacctacatacattcaataaggaaatggataaacgtgatcataaaaagtttcacatgttctcctagaacaactgtacttgtgattttgaagatactggttgtacaaagttcggttctcctggggtttgcccttgtgtgatgcagaccagcttcctcttggtcattgcagaagtgtaactgacattctctattaagaccttcttgctgggtggtggtggcgcacgcctttggtcccagcatctgggaggcagaggcaggccgatactgtgagttccaggatagccgaggctacacagagaagtcctgtctcagaaaactaaaataaaaaagacttgctgtccttttccctactacttccccaggcttccctttaactatggacaaagactgcaaagacagtcatagaatgaggagaaaacccaggtcagtaaaagatttaacaaacaatgtttattctattcgcccaaatttgcctttatccctggcccatcatttttttgctccatgtttctgaatacagggttttactattccagtcagtccctaaaatgtcacctcaggccctttccctgcagagttgcagctttgcatgtcttgatctcagctagactaggacctacgtatttggtattctaacatgggcttgcaggtggggccttgggagagttaactggagatgagggacctggcgtgtgacctgcagagggatgtgagctttgagtttcatcttcgttgtcgacgtccatagctggggaactgggaattatagtgggattttctgcttgctgtacagtctttgtgacagatttcttctgtttcttttggttgtcagggtcgtggggctgtgaggttagagtggaaaaagatcatatttctggtttagataatccccggtcagcctcagaatctgactcccttcctttctataccatgaacagaaggtcaagtttcggatgagaatagttaaatttgacctccccctggagactgttttctactagggtaggggtggggaacaagatggctttgtttggttccttcagaccttagtaattagggactagacaagcacaagacggaattggttagaggtccctccccttgctggaatggcataccagttttgaggctggagagacatggagacggcaggggttgggttggatggaaggctagataccttgcctaagatttcagggcgaagcccattggaggcagccagtagatcagggttcttctgtatccagttggtaagggaggtggcagcagctgttgtgcgggaggtcaaggtcacccgggcaggtggtatcttcaggggcatttgccaggtgcccatgaaggatccccaaggactcgcctaaaagaaaaagggattgttcagcagggcctcatggctgctaagtgtccccttagcagggcttgctggcatcgcatccattctgtccctttggcatcttaataatgaccatttccctactcttcctctctccagttagtcacaatgcagttcttcagcccctttccttccagcttaaactttgcattcttaggctaagtgtgataaaggagtcctgtgcatacgtattgtcatctgaagatactgtttatatagtcaccattttcaggacttcatgtgctctgtgttggtggaccactggatagaaggttggggcactcacaggttggactttcattttctataccgtgactgtagctccgttctcatgcatcagctcttttttgttttgtttcaagacagcatctctctgtatggtcctggctggcttagaattcactatgtaggccaaactgacttcaaactcagagagagctgcctctgcttgctgagtgctggggttaagggcgtgcaccaccacacctcgctaactcttacctttctgataagaatggacgtgggaatctcaccttggaacggggcactgaaggcaagaggtgacctcggtcgttggcaataatctgagtgtaaccttcatgggtagctattctctgtggtggaggcggaaggaaaaacacttgaagcaaaagagggaggaaaacaaagtgtctgaggggcttggagcaaaggtgtgggagagaaggtggaccattagaaggtaaggagttagacgggtgactgggagaacatgaggccagtcatcatacactggccttggagggcaccgagcttggaatacctcttttgttggcttggcaggagaccagttctgcaggtacttgggtaagaaaggcttttcatactgtggagaaaaagaagcggttcaaaggcttaagctcatgaaatggtggcacagttctctgtaattgaaagccaaaggcctcaacaattatgtgaactcttaactcactgtgacaagggtggaagagattttaagggaggggggaactaagtgatggattaaaaagaaagcagaagtgggcactacatctgggaagaagaaaaaccagctggagacagaggggaagagggagggactgagaagttgacacttgtgtatggggacgtcctcacagtacccagtggtctctatgctaaaagcaataggtctctaacctaaaagcaatgcagaaagaagaaagttcatacaaaaagagaagacattaaagacagggaagaaaatgtttgtgtttttgcctagctttggatcaaacccaggatcttgtgcctacaaagcaagtataaggttataatctgtttgctcagcatgtgtgttgcccagcatgtagcaactggccatatgttaaacatgtgaaaagcaacgggtaacctgaggcactttctaaatatgaagccctggaatgctgggggtgaagctcagtggtggatgcttctctagtatttacagagcccagggtttgatcctcagactagtgggcggggggggggggggggggggaggggtggattttaaagaactagtataagagagatgtgtgtgccaggcagtggtggccttgattccagcacctgggaggcagaggaaggcggatctcaaacaacaacaatgagagagaggtgggggggcagatattttttttaaataatttaaaaaatagttaaatgttaaaatattttggtttattgggtttcacttgagcattactaaatttaatttttaattttcacatagctgctaaaacctttaaaattatgtttgtgacccactctgtcaggcaatgccagactagactaagagtaagtaactaagtctatattgcttcctgcttttgaatggccagcctggtcaacaaagtgagttccaggacagccaagactgttacacagagaaacactgtctggaaaaacaaaaacaaacaaacaaaacaaaacctacaaaagaatgtttttttttgttgttttttttacaagcatttgtgttgccttaacagaaggtagttggccatgatcacacacacaccagtaattccgttacttcccagagtggggtaggaggatttatgactttgtgggcctgtctatgtgggctgcatagtagcaagaccttgccacccccctacacacatacacataaaagaagaagaaaaaatactaaactttgaattccaagcgaacaaaattctttctccaaaataatttttaaaatgtgcagacatggtcccactaccaaattctggttggcttggaacttcctatgtaggccagactggctttaaactttcagtgattattttgcctttttgtcctaagtactggtattgcaggtatgtaccaccatggccagatttgggggcagggagcaggtcccatggagctcaggttcgccttggattcagtatatagccaagggtgccttgaacacctacctgattctcctgcttctgcctccagagtcttgggatcactggggagcacctctacatttgcctcagttactatgtcttgaattttttccaaagcaaactaactttcatctaaatagctatgactttgttatttgacttacaaaaaagcctaaagtatttactctggcctgtaaaaataaaatcatcgcctcctggcttacactctacaagcttaacttaggtcctttttgcttgttcctgaaaccccacctcaactcacttgtcgtctatttagggaccaggatctgatggaggggtaggcctgaaggttgcatctggaaggtaaaatcaaaagctaggggatagaacgagaacttacctgattggcactgtagttagtggccatgatcctgtcctgtttacacttgttgcttggcaactgtagaagggaagccttctgggagtacctcccaatcagcaggggttgcctaccttctgtggctcacactgccccctccctttctctttggaacctaggttcattttccttttagagcatagaggacagaataaacgtgaaaaaaatgagctgagaagcagctgcctcttttcccaacataagttagccccgcttcaggatttccgggttgtctctgaatgacatcgtcaactatttaaacaagctttgggacaccaagagctgagtttgtgagacagggtggtataatgatctagccatagaactagaaacagggaggagtccttattcaacgtgctgttatatggcttaagccactggcttcccttcgataaacagtggtcgtcacatattgtagagacgacatgctttgtaaagtgtaggataaagtgaatgacatatcttgacactgtaaatgctcagtgggaacagagcacagtaaaacactggttacagaataacaaaggcacggtgcttaggaagccagcaacttgattgctcccagaaggaaatgtctgtcttgtccttggtccttcagtggctcctgtctcctccatcactttacagtcacagaacccaggaacataggttcatagttttggttaggatatggcaaatcaggacctagagtaggaaactgagcaggaatgatgaaagtgtaagatttgcaccaggttcgggagaatcaagtgatgatgcccaaacctattagctataaaactaagaaaccctctgagactcatcgaaatttctgttaagccgatgtactcatgtaccgggtgttagaactaaagaacatttcagttatatagtctcaagtttaaaaaaaaaaaaaaaaaaacaagttgtccaaagaagtatatacttcagagccagatatggctgtgcatgcctgtgatcccagtattcacagtgggaacagagcaggaggatctcaagttcaagatcagcctgggctacatagtaggaccctatcttaaaaaaaatgagggactcatgaggcccccactccttccatgggcagttaacggttgctgggggaggggctcacaaggccccacccattatgtggagtcactggcagttaatggttgctggagaagggcaagccctttttctttagtgttgtagctagccactggtagactgcccatgttcttggaaataacctcccattcacacaagcaactctgagttcaggaggacatatacacatttacacgcacacaaggacatggtggtgcctttaattccagcacttaggaggcagaggcaggtgtatctgtgaatttgaggtcagccaggtctacatagtgagttccaggacagtcacataatgaatgagacctcatctcagcaaacaacaaacatccacataacgtgggaggggggcttgttggggagcagagggggttcattgggagttggggggataagagggtaaatatgatcagaatatgaaaccacttttatataattaatagatgctggtttaaaaagaaagcgtagagggggaagggagctggcagagggctcagtggttaagtgcttgctgctcctgtggacccacgttcagtttcccagcccccatggctcataaccacctattactatagcttcgtgggatctgacactctcttctgacatagcatatcattaaaaatacaatctctttattttttttaaattttatcttatgtgcattgatgttttgcctgcatatatgtctatgtgaggatgccagatcttctggaactggagttatagacagctgtgagctgccatgtggctgctgggaactgaacccaggtcctcaggaagagcagccagtgctcttaaccaccgagccatctctccagccttctttttttaaagaaagcaagctgtgggctggagagatggctcagtggttaaaagcactgcttgttcttccaaaggtcctgagttcaattccctacaaccacatgatggttcacaaccatctgtaatgagatctggtgccctcctctggcctgcaggcaacatgcaggcagaacactatacacataataaataaatctttaaaaaaaaaaaaaaaaaaaaaaactcttgctttaatgagaataagtgctgtggtgatagagattaaaaacgtgccaaaaaaacagcccgaatcatctttgtgagtcttgaaaaaagatgtgatatttgactttgcttttgaactgcaagagaaaatagactccattgaaataccaaggttttgccaagtagtgtaattgaagtccttgtctggtcgcacagtttaattctatttttgtaagaacgcaatggaactgcatgagagcgttctgcattagcgccttgtgatactagtacatagtgcagctacgctgtaacactttgtgaaagccagttttaacactatgttacattttttgtttaaagtaagtataaactttatatgacataatgacatttgattcctggttttcccatggtaagaattagggggataaataaaattgttactggaaaaaaaaaaaagaaaaaagcaagctgcttgtggtaactcacacctataatcccagcacttggctgggatgctgaaacaggagaattgctacaagtttggagctagcttgggttacttgagattctacctccaaaattcagggggagataattgttagttttttcttcccctaaaatctttatcccatccaacacaccctcgtgaggacactcctgacccttctagataacggggcaagaacagcccttgttacaggctctcacagttaactgcttgatagtgtgacgtaggaaagtagatgagtgtgctttgtccccatgattctcattactctctagagtgatggagaggcgagttattttagggccaaggactgtctctgctctagaatatccattttgtccacaggaggcaaagtgacagttctgcacccatattttgctgagaatttctgtcttctttaccggttcttaaggcagttttccttagctctgtgggcagtgtgtaaacatggagctaagtggggacaaccaccagtgtccatcctggagtcaaatcgtctgagtgaagttctggatgtccttggaaactgaggtcttatggaagtgcccaggcttctgtgaccttccatgggaaatgaagactatcctagttttgagcattaactatgcataacatatcatggtaggcattttatacaaagagggctcaataattttaacattgttattagtttaagagagcccaaaggaatgggtgtggtggtgaacacctttaatcccagccttcaggaagcagagtcagatggatctctgtgagtttgaggtcaaccagtgtacatagtttcagttcagctatggctacataatgagatcctgtctcaaaacaaactaaagcaaaatatacccagagagaccagaaagatggctcagtgagtaaaaatactttcgaacaaatctgatgacctgagttgtttgatcccagaacccgaataaagaatccagccatatttggagccacagtgctctcttccacctagatgggggtgggagacaggcagaaaccgaagatggagggagagaaccaacctatggcatgggagtgcatatcactttgtcttttcaccacaaaaattattaagtcagccatttgttcccaagctgagaaacagcgtccagagataacgtgagttgttcccagacagtctgacaatataataggagagaagagaaaggacggaaacgattctggccaatgaaagggctggggtgtggctctagttggtagtgtgtgggcctcacaaacaggaagccctgggctaggttcccagcacagcataaaccaggtggtatccagtgcttgggaggtgaggcaggaggatcagaagttcaaggccatgctcagatgtatatgggtttgaggccagcctaggctacatgacaaggctgtctcaaaataataaaataaaaaaagggctggatgctgggcggtggtggcgcacgcctttaatcccagcactcgggaggcagaggcaggtggatctctgtgacttcgaggccagcctggtctccagaacgagtgccatgataggttccaaagctacacagagaaaccctgtctcgaaaaaccaaaaaaaaaaaaaaaaaagagcaaaggtgcttgccactcaggactggcaacctgtgttgttctgactttgattctgtgctgtggctcatacctgtcctctaagcacttagaggagtatgcagcttgaacttttaacatatccctgccctgcccctgcaaaaatatggaaccaaaaatgatgagtaagcagttattgttaaagacttaagcatctacttcccctaccacacagtttggaccatctgaaccagtatctccaggtttatgttcaaccctccaagatttctcccaagtagctccaaggagccctgcatcctccctcactggtccagaagataaacaggtgctggagtagacatttgtggatctcgacttaaaaactgaaagcagttttgtacacagtaaggccagaaatgatgcatggctacaaaggtatccgcttccgttacaaaacacctctaagtccaaaagctaagttaattttcttttctgagaccacggcaccccctaatggaaattgctattatctctcccgtgagagagtgagtgtgtgtgtatgtgagtgtgtgtgtgtgtgtgagagtgtgtgtgtgtgtgtgtgtgtgtgtgtgtgtacaataacaaaaacaaaaaaaaaagctggtaggttttctaggcaagctactcaagaaaataggagagaagatggcacaaactaaatcagaatgaatgaagaagcagcaaagaaagtatatacttgagacagggtatctgtggctcagactgacctgtagcagagcctgaccttgaatttcagatcctccgtcctccatctcctgagcaatggggattggattacaggcgtgacatactcagagggagaaatcgtttaaaatggaaacatctacattaagaaagagtgtgttttacatttttaaattggaaacagtaagtactgttcagctgggttcagtgatgttgaggaaggaggaaggcctcccagaaatacagcatgagttaaaggacagtctaaacaacattagtgagctccagttccaaaataaaaacataaaaagtgggtcgaggatgttgcacggtgctgaaatgcctgtctacatgtgagaagccagggtccaatccttagtattggggttggggtgtgcattcacggagccattccctgttattggctgctcttcattgtcaactccactagatttaaaatcacccaggagactcccttctgggtgtctgtggaggtgttgtcagatttaactggtaggggaagacctacctggcatgtggatcacgggggctggcagcccatgctgaggaaaactgctgaccaccgacgcagaccagtgttcatctcgtcagcttcctgtctgcagactcaagtgtgagcagctgcttcacactctgacaccttgacttcctcaccctggtggactgtactctggaactgtgaaccataataaactctcccttcataagtagcttttgtctggtattttgtcctagccatgagaaaataataaactctcccttcataagtagcttttgtctggtattttgtcctagccatgagaaaattaacaatacacaagccacacggtctcttgtactattccaggacttggccagcagggggctcacataactttaaaaaatagatacaaagccagcctgatcctcaaagcgagttacaggacagtcaggactatatagacagaccctgtctgaaaaaaaaaaaaaaaaaaaaaaaaaaaaaaaaaaaaaaaaaaaaagaaagaaaagaaaaagaaaacctgaataaataaatacaggacatttaaagaaccctgaaagcaggaggtagaagtgggaacatgctatgtaacaaaacaaagccatgtttaaagaacaaaaagggtagaggggtacagtagggatggcttatctctgccccaaaatcagaatcaccaactcaagctgacaagacttgaaggctgatgatagctcagagagagaatggagtcatctagaactgctccttcatgtggctgtaaacgatgctggttctaatgtaccttacactgataagttgtcatgtattgtttgatctcactaggaagctggctctggaagtaggcttctccctttcccctatttcagaccccagcatgcctgtctcacagtgtccttccagtctccttgtctataaattggctgcccccctccccacacacatactctgtgacagggaaaaacagggtgttggatgcatctcatctgaggctgtaagcaggatcacgaacatctggcttcttagaagacatcttttttaaaaattaattttatttagctattttaccatcagggcgttttcttctcatgtccaggatggtagagtctatgtgcatcccaagagaactaaggggaagatgtgtaactttgtctcataaaaccggtgtcatttcctccttagtcagcttctcccaaggagatacagactacattgctcaagtgagtacacagaaatagccaagatacaatgactggaaattatttagtgactgcagtccaatgtccggtctttcttttttgagaagccgcacccacactcaggtttgtaaggtgtgtcctgtcttttctaaactcccccttgtctttcagtgtctgtacttaagtctgtattaaacagagtggtgtctatacgaataatccataccagctctcaggaggtggaggcaggagatgtctcctgaaggacatctgaaacattttaaacgtgaagattaagagaaagagatgagaaagaataagacatacttaagtgttcatatgggctctccagggagagtcacacttaagtatctcaacataagccatatatacctgacgttgcatctcaaacggttgcttaggaacacacgtttgtagggttgttctagaggagccatcggagttgcttggaggatttgtggtgagagtcctggaaaactgtttcttcacaaacgggaagggtcataatgccttaagtaaatgttgctaattgattgggtttgcagtactttactttcttttctctttctttttctttttctttttctttttttaagataggttctttctattaagtagctccagccatccagaaactcaccatatagaccaggctggccttgaatttacagagattcacatacctctgcctcctgaatgctgggatcaaatgcacatgaccccatgcccagccctacagttcttgattctcaattggccagagatttcttcagcctgaccctgatgtgaggggctcctttcccatatccccttaagtttctgtcttcctatcctcttgacacatggacttcttagtttctttactctctcacctctctgtgaaaacagggtctccctagtcctggctactggagcttgctatgtagcccaggttgacctggaactcacagaggcaccagcctctgcctcccaagtgctggaattaaaggtgtgtaccaccagctgtgtagaatagatttgaaatcagtggttctcaaccttcctaatgctgcaactctaaaatacagttcctcctggtgtggtgacccccaaccataaaattatattctttgctacttcataattataactttgctactgtcataagttgtaatataaatgtctgatatgcaggatatctgatatgggaccccagtgaaagggtcattcgacccccagaggggtcaagacctatgggttgagaactgctgttttaagtaaagttcctgtgtaaaaggagcttgtggacatcagtgtaaatggccagggtttggatctaggcccatcacttaataggatgggatcacaagtatgtctataactttccctgacttgtaatgtttgatgatgctggttaaatccatgattacaaggatttgatggcactgtaaagtagcttgatgcaaagtaaatgcgaaacgaacaattatgatttcaaagttcacattagtgaattaaagattctagaagttcagttgtggtggtgcacacctttaatcccagcacttgggggaggcagaggcaagcaaatctctgagtttgaggccagcctggtctgtagagcacagagaaaccctttctcaaaagacaaaaacaaaacaaaacaacaaaaacaaactttgaaagttacttaatgaacggcaatcttcctaagttaactgtggaactgttgggccaggcaggggttgggggtggggtgcaccactgcaatcacaacactcaggctaatggatttctgaggccagcctggtcttcaaggctacacagatgaaacctgtggcgggggttggggtggaggattaagctggagtgacaggaactcagttggaacaaaagcacccatttcccttgggagctcttgtggttctcctggccacagccctgctacagagagggttgggcctgccatttctctgcccctctctcctcctgcaaatgtgtggcccctgagagtcacatccggcccccactgtccagaaatgagctcagcccccactcctcccccccttcccgtgactcacgctggactacccggaaagctctattgagaccgtgggaccgggcaagaaggcaggacggccaggggacacggcgtggcggtcccccccccttccccgccccgccccgccccagaaggaacccgaagcttgggatgggccaaaagtctgcaaggccccaggtccgcagtttggtctcatgttttctagaaatgctttgcaacccaggccagccccaaattatctgggaagccaccacacacgacatccctctgttttcggttggcttcctttgtaaccagtgttgcaaacgcgaacttgctttcttcctgtgagataggtctatctgtacaaaccagcctcgataaatcttccacctcagtctggactccatgctatgtgtattattattatttttaaagtaacaaatgtacttttaattgatttttcaagtaaaaactacacagggaggaggatcagcgattaattctggctctaatttatcagaaccatatcatctacattagaaaaaaacaaggcattatgtcctcacgggtcacatgtgcggctggccaccaaatctggtctattatattacatatttcttcttcagctcttccactttctccacataggttttcatggcactttcctttgaagttcctttaagtttattccaggaatcccatttggccttgccgttgagggccaaaagcccgggccgatcgatctgtatttacatcgcccacggtggcttgtttgaagtggctgtagatgaagagcatctcttcgtcagttggctgggtctccaggcgcttcacctcctcagcagctttgtcaaattcagcctgagacattctggcgaggtgatctggatctcgaaagcccgggagcaagtacaggcaggtagcactcaagttctatgtgtattattattacattgtctgttaatataagaaaataccgtaacgggtacaaaaccgagttcatttagctttcgattggaggccaaaggctcagtatcaagtgctgtcatgtgtcagttgtctggtgaggatctcatggtgagaggagacaggtggagagacccgctgatcagaagccgagagaattgagggaccagacttaaaacaaacgaacaaacaacaagaacaacaaacccaactttatcataagagctacattcataatgaaagcaactgcaatgatctggacaccttccagcagcacgagcactagccctgtgtgtgtttgtcttgggtgctccaacatacgagcaggaatgtagtggtgatgcctggattaactcactggaccctacttttatttttaatttatttttatgtgtactggtgttttgcctgtatgtatatgtctgtgcaccatgctgggtgtctggtgctcagagaagctaaaagaaggggtgggatgcgtttcattctggatactggggtcatctggaagagcagcttttaaccacagagtcatctctctagccccatcagggctacttcttatattgctatcttctcaatagagccacaatgggcaccaagcttctagcacacaaacatttggggggatatacttaaaacatatccaacccatggtacaacatgaggcaacatattcttggcttaatacgtggatacattgggtgatgctattttgcttaacactatgggtcaaggtgagggtccagttagaggttagtgtatggtcgcagctcaatcctcatccatcctgagtggaactcctggagatgagcagactcagaatgccagcacaatggtgagttctttctgatcacccggatgaggttttcactgtgttctggaatgttttgccctgatgataagaggaggccatcacattatttgctttaaataaataattttaaaaagatatacaaaacaaaaagcaggtagctgaggcaggagtatcaccttgatttcaaggccagtatattaagagcactgtttgcctggttgcccttctgtggaactgggttctgttcccagaacccacatggcggctccagtgtctttaactccagtttccaagtattcagtgccttcgtcttctggcctctgagggccctgacatatattcaagcaaaacacctatatgcattaaaaataaataaaagggattagggaagtcttattgaggcagccagagctcccaacccaaagttggtagcaggctgtcttcctgagtgaggcttccacagaaaagaacaaacaccatgcagcagctagtaactagagctgcttgcaaaagcaaccatgctggagctcccggctgagagttctggctttcttagtgagagctaggaatctgaacttgggtgttcatacttacaaagcaagcactttactgactgccccctctctctagccatggggattattttttcataaacattattattatttcgacagagtttttctgtgtagccctggctgtcctgggactcactgtgtagaatttagaggtctgcctgcctctgtctcccgagtgctgggattaaaggcatgagacaccagcacccagctccataaacttatttttctgtgtatgtatgtataccacctatctgcaggacagaagatgtcaaatcctcaggagctggagttccagggtggttgtgagccagctggtgttggtgatggacccacaggggtcctctgcaagagctcttgacagctgaaccaattattttccttctgtccctaaaaaataattgtttaatgaaaagggaatatgttgtttcaaactggtttagaatcaagtaccttaagattcctcgtggaaagagactgtgaagagggagaaaggaagaataattttcatgtccaagaactggacggcgacattaaatcaacaagcaaaaccaaagacaggcgtaaatggaaatgggagcatctctgctatatgaaggttaaagataggcattataaagcaagatttaaaaaaaggacggggagggggtttggatctcagtactggttataaacgctagcggaaaggaacatgaacaagaaaccagagcccttcggggacagaagacacgactgactactccactcactgagcagccatttctggctctcaatgtgtccacagtgcctcctggaagacactatctctcgctgcagaaacaaaatccatcctaagtgtcactgccctgaaaggaccagctcatggccgccactctgccttcgctcgtgaaattgtgactgcgctgttccaatcctcgtaggaccccggggacatgggatttcactgtgaattgcttgcgtttttccgagccttttcacttctttggatgtttctataggaacgaaaagacaaagaatgaaaaacttatgtttccgcccggtttcgaaccggggacctttcgcgtgtgaggcgaacgtgataaccactacactacggaaactagctgctccatgatgtcttttaagcaaactacatttggggcgtgaatctaatttttttttttttctttctggatctggttcttaaattgaacttagtcaatcaattcctggaatcaggcagttccactctgaggctagatgacattcttccatggatatacattggtatctccgaagaaaagtgccagtaagattaagattccagccatgatcctgaggccatgaaaagagttctaggcttccgtaaacacccatagttttcccgaacccgaggatctccaggaatgcctggttgatgagtcaagggcaccccctggcgcctagcatctgttgtgtcccgggactggagtcttcaggcaggaagccactcaggtgagggccttggctggaagggcgcacgctcatgcccgaaacaatgaaaaagcaccttacatttgtcctgaacctaagtataaagcattttcaggcttttctgttcagcttttttttatgagttaaaatgtttatttgttgtactcactcatatgtggacctgctttatgatacatagtagtgaccatgctttatcagagagctgtttttaatgatgttgctcagattggtttcctcccagatgatgactgagaaactaattaaaaaaaaaaaaatgttgccaagtacaagggtaacagaactgtgctgtcttctgggattttgttttttacttttttgttgttgttgtttgtttggttttttgtttttgtttgttttttgtttttttaaatggagtgtgctggatgtctctacaattttgttcaaagtactgcataacctggaaaagctgttgctgctattgatgcataacatattgccattattgctctttttatataaatataaatatatacatatataagcaaaataaaataaaataacaaacaaacaaaaaatgtttatttgttcatttctttcgtttaaaatgctcttcgatgacattctttgccttagcacttaatcatggcacagctgcatccgaccagccgctttgtcggcttttcctctgggtcggttttgcagaagccggcccattcctctagtttattgtcaactttcggtttatctgatgctcagcgctaaggtctccctccaacttaacctacaggctcttctgagaacttctgaaagagatcgggcaggttgaacacacaatcctcatcccgatcgaccagtcccacacagtcattcctagcactttggaggctaaggcagggttctaggctagctccactgtaaattaaaaagtttctttttaatttacggtgggctgggactctccagagagagtcacaaatttataaatacttcagatcaaccccaaagccttgctcaagtttttgttttgttttgtttttgttttttaatgttctactgatcagttacatcttcagtcctctgccagacactctgaatcagaaaaggttttagcagcctggtctacaaagtgaattccagaacagccacagccgttacacagagaaaccctgtctcgaaaaaccgaaaagtaaaaagaaaagaaagaaaaagaaaaggttttagtgatggatataattgtctttggcttttaagagtcccaaagccattcgtcatttggagttttcgtctactatggaaaattccacaaagacttctgagattcaagccctagttcccaccagttactcagaggttcctgattagagacaccgaggatgtccacccgaaggggtgaaatgttcaaatgataaaatgatcttggaaaatgtctgtcctgggcatctgggtacagttaccacaagctatgttttcagtcctctgtatcacaatcaccgagatcccctgagttttgtaaaggagctagagtcactcagcctgagttcaaggatcaagaatccagaagactcaaatcaacaacccgcctgtccaaggatataggctttgggttgcagcatccaagaggatgacacgaaagctcgtcaggagcaggtgaggcagtctagggaaattctttcagacccaagaacgggcaatgtggtcaggtgatcctggactctctgcgtgctgtgtgtgtgtgtgtgtgtgtgtgtgcgtgcgtgcgtgcgtgcgtgcgtgcgtgtgtgtgtgtgtgtgtgcagcgtgtgatgccgacggtgtgtcgactgggcaccaaaggaggcagaaaaacggatatgtgcagttttaaatttcggagcttcggaaagagcaggaaccagaagaacagtgagaagaagtgggttaaagtgtacaggaatgcagaggcaaagaaaaatgtacggtgtatggtgagggggtgctgggcagcacgaagaccatttgggaaaacagttttatgaacgatactaggacacaatagttaaacactagaatacaaaaacacaacttccctgaccgggaatcgaacccgggccgcggcggtgagagcgccgaatcctaaccactagaccaccagggagtgctaatagctggctttgcataaagcattctacttggaaatagacattcattatatgaatttggctgtttcatggccagccacaagcaaccgccgcgcaaagacagccttcctaacaattctactccccacagcctcaaaacgcctaccgcctccttctttggggagggctggcggtaggtaggtaggtaggaaggtaggtcggtctcctggacaaggtaaggtgagaggttccaggctggccaccctcggccctgaaccctggcaaaacatgaacaggctgcgttggccgggaatcgaacccgggtcaactgcttggaaggcagctatgctcaccactataccaccaacgctgtgtaccaaagacgccacgcacaccacgccggggactgccaccagccagtggccgcgcaccaactaactccctgcagcggctccaccgcggcctcaaccccacagccaacgccagggccaaggcccaggcccaggcccaggccaagcacaaccggggctgcgccgctgcgcgcccttctcaccggcgcgtcccgcccgcgcctctcgcacgcacacagcccggcacacagcccggccggtggggcgctctcgcctccaaaccgctgccatccggcgcaccgggacggcccgggcacgcttcgagggccccagggaccagggtagcacccgggacggctccgagccgccaggtcaccatccggacccgcctggcacagcgctcaggccacgcgagtggcgcgccgccggctccgacgcccgccgcttcctcgggaggacggcgcgttcccaggcatccgtcggagctctgggcaggtggccggcgaggtaccagagggcccgagggcgggagggcatgcctggcattaggccgcacgagcccggctcttggacgccatcccacggtgggcagagtggggccgaggggtcagcgcccccggggccgcccatctggcaaaaaagtgacagcaggtctccccgtcggggaatcgaaccccggtctcccgcgtgacaggcggggatactcaccactatactaacgaggacgacgacggcgacggcaaccacgacgaccaccccgacgcccgtccttctccgagaccagcctggccaggttcgccagcctccgtccgatccaaacccccaagcctccgccacgcggccacaacggccctcgcaacaggaccgggacacgccggtaaccacacagtcacccagtaattgacacacacacccttctccggagaagaggcgcgggctgtcaggcatgcattgttgctgcgctggttactacaccaaagatggtgggacgcaacccggctgggtaaagaccagagatctgcggacctggagcatcatggccactcgattgctgcttttctgtggaatggtccacagcttcaatctggagtccagatgtcccagttccccgatccaaccctcaaaagatgagcgcgtgggttcaagttgtccctgccaaacgcgctatcgtgtttctgcaacaacagtcaggatggccgagcggtctaaggcgctgcgttcaggtcgcagtctcccctggaggcgtgggttcgaatcccactcctgacagctttatcctttccttcggtacattttattcattcttgtccggttagcaatttgctggtttcaggtatttttctcttcctgtctagacataaatatcaaagtttatatgcaccaaaactagctctcttctcttctctctccccagcccctctcctcagttcctcttctttttcttgtcgagtgctacgcaagcggtgccattaaagtacatcctgaaattataaagtacatccccgagtcctttttttaactcaagccttacttcattgtagcttccttccttccttccttccttcctttctttctttctttctttctttctttctttctttctttctctctctctttctgcattacctgtcaccctcaccgtaagtttatgtgtctattttttttcagtcatcgctaaaagaacattacacttcatgttgaacctttttctaggtgctttacaattttatttctatatttggtacagtgctttattcagattatctaattaaatggttagaatggttagctgtaagatagctatccagtgtttccacctttatttggaatatagaagtattttttcttactggtctctgatactagtctttacacactaaatttctgattttgtacctaattgctgaactttattcatgtttggctttttgtgtgtgggtggttttgtccaaggttgtgcctagggcttgggaatgttggacaagtgcttgagatgttagctacaaaccctgttcttttcaaatttttgagatagcatctcacagagttgtccagattggcttcaaactatgtagcaaagactggcttcacacttaagatccccctgcctggtttccagttctcaagaactcagcttgaagttgcttcaactcctcattgctcccttccttcatttcccaccactccctttttttctccttttaattacttactttttttttttttttttttttttttttttgtttttcgagacagggtttctctgtggcttggaggctgtcctggaactagctcttgtagaccaggctggtctcaaactcacagagatccacttgcctctgcctcccgagtgctgggattaaaggcgtgcaccaccaccgcctggctcttccttttactttaatagcatttatttatttatttatttattttcaagacagggtttctctgtgtagctttggagcctgtctggaaattgctctgtagaccaggctggcctcgagctttcttttcttctttttctttctttgtttctttcttcctttgtttgtttctatctttcttcctttctttctttctcaacatttctgtgagtgtttgcctgaatccatgagcatcctgttgaattcagtgcctacagaggcctgaagacaaaatcctaactcctaggccagaggtacagcagttgtgagttgccatatgggttgtgggagccaaacctgagtccactataaaatgtgacttaggtagaccttgatattgctggctagtggaagatgggcttgaacccgtttcttctgtctccactcccgagtacttagaatacaggcctgcatcaccacacctggtttacttgttattgttgttggtagcataattattattaggggtgtatgctatgtgcacttgtggagtcagggatggctagtatttcctacatgtgtttttcccaagagcagagcaagggagtgaagaggcttctttctgtacaagttaggttgagtatggcgagaatagttgatgggagaggagccttttgaaacttggaatgcaaagcacagctctatgctcaaagggagtaagaagtggtttattctgaactaaatatgaatgactgtgacctgggaacacgattcagtttgccccaaataacatgtttcaatggggaaaccattacataaatttttatagccacaaaacaaattcattagccaaggtatactttaaaggtactgctgcaaacacaggtagggaggagcaaggggggaaaaactctcctacaggttttgaatgttatgggaggacattctcagtatatgggtttgaagctagtggtctgtgaaggatttcacttgacggtgtattgatagttacaggggtggggtggaagagagacactgaaggatgtttttactgctttggtaaagagctgaaggggaatcggcctctgatggactgactgcctaggagctttgcaacagctctttattgttacttaaaaggcaggtgtccacaggtgaacaaaggatggctattaaggagacctaagtagcccaaagtaatttggctctgagactgtaacattccatctccctacaaccacggagcaatcagctgatcagccttgtagaatcttcagctgatgccttctacctctccccaaagagaactcaagtctacaggattgaatatgaacaggttcactgttgctaaattagagaacacacattgcatatgtctgcatgtattagggtcattgctttattcccaagctttctctttgcctttgctttttctttttgttattgttgtttgggtgttctttcttgtagggtgccatctgtgttagtcccatgatcaggagccatatgtctcttggtgtctgctgtctgcagggctatgatccggaccagctgaacagcccagggtccattcctgagtggggggaatgtggatgagggaaggctagctataggcattaaagaaaaaatggagacataagatcatatcaggagggcagtctcagctaacactgaattcacggagtttattcatgcatctgtcttaagtaactaaccaaaggtggggacaatggcaaaagacttctattatgcgtaaagggtggataacaattattcccctaaatcctgaagacactctgtagctgcaagtactgcttggccgtcaggcactccacagctactcgtattatctactcttcaggatgagtgtaaactcgcctggacccaagtctattgttatttagataggagccattcaccagcaagccaggacatcctgcagccaataagctagtatcttaggagatgcagctctctgaacttgtggcaggatgtaatagatttccaatatacaggcccagacactttctcttgttttctttctttctttctttctttctttctttctttctttctttctttctacctttctttctttcttttcttccctccctccctccctcctctttcttctgtttaagataacattttgccttggagctatggctgctctcaaacgaaaaattctcctgtcttagttttcttagcactgctattcaaggagtgtgttaacatgcactgtggtgttttgttttgttttggatttttccagtcagggtttcactgtgttagctttgtaggccaggctggcctcgaacttggagagatctgcctgcctctgcctctcaagtgctgcgtttaaaggcatgcattaccatgaaaggactactttctttctttttttctttcttttatttgaaaagggtttcactatgtagctctggctgtcctagaacacattatgtagaccaggctggcctcaaactgaaagagatctggctgcctatgcctcctcagcgctgggattaaagatgtgagccaccaaacttggctttgtttttgttgttcctgtttttttatttttttaacagaattttgttgttgttgttgttgttgttgttgttgttggtggtggtggtggtggtggtggtggtgtgtgtgtgtgttttgggtaactgaactcaagtcttctggatattagccagatctaatcaccaatgagccatcgctctaacaccatgaaataattttaaacaagcaatgaaggagcctttgacaacctggcttctgagactatgaaatatggagtcacttgggataagtcttgaatgctgaggagggaaagcaaagaaacaaaaaaccctgagatatacaatctgatgttaacccaaaaattggccaattaaaaacccagttactccactaggccgaattaaagcaaacatttacttgattgattgattgattgattgatttttagagacagggtttatctgtggctttgaagcctgtcctggaactagctcttgcacaccaggctggtctcgaattcacagatttcctcattcatctgcctccaaagtgctgggattaaaggtgtgcgcacccaaggctctgctaaagcaaacttttataacaatattaaatactgatgaatacggaattaggtcacacatatttctggaaacgttccaacaattagactccaagggagcatttttgtgggataatatatatactcaagccatcagattgccctacggaaaatgacgacttgctattatttcccaagttctttgaaacagtatcaaagatttggaatctgctcgtgcgatgcagcattggctacctcaaagagactagactggtgggctgcccgtggatcacgggaatgcagctggcgctggagcccgcgccagggttgggcaggaggagatgtggagccagacattgcagtgtgcatgcgtgcctcagaaccaaaagggactggtctctgcatgggccgggaatcgaacccgggcctcccgcgtggcaggcgagaattctaccactgaaccacccatgccatggacaacaccgttccccacggccgccatcacagcccgggctccccgccggcagtcccaccaccagagagctccctcctcttgccctggcaggaaggtcctgggccccggctccatacacccggcaggggagcgccagggacacggagaccagagtcccgggtccacactgacggtgagctcgcggggtgagccgcgcctctcccgcccggacgccagggccccaagtcaagcccgccgctgcgggcgagccagcggcccggcggccggccgggtgtctgtgcgtgcgcccagcgtctgccaggtgtgcgtagggaacggtcacccgcgcagagcagaggcctcgacgaccccacccgacagcaggggcgccgtgggcgtctcccgcacgagtttggagggaacggaatgggcgagaaagagctggtggacgcgagggctgggcgatcagggtgggcggagtcgcgcgtgggtggacgagggttccccgaaaggctctcgcacccggcgggcgggcgggctttgccgcctgccagcgtgctcaggaccagccgcctccttcccgcaccctcccggactcaaggcggagcaagacgaccaccaggcgccccatcagaacccccctccagtagtagctggtgggtgttgagaggagggcgctcctgcgcgcacaggagtgctgtgtcagggaaggttgactggagtcaggcgagaggcggcgcgggaggggttgtggaaggaggcgagagaggcggtctctccaggtggaggttgcaaaacaaaacacacacacgcccaaaaaccaactgacaaaaaaaaaaaaaaaaaaaagttgtcaggagtgggattcgaacacacgcctccaggggaaactgcgacctgaacgcagcgccttagaccgctcggccatcctgatgagggtctggccgccaggcggctccactggctagcaccaggcgcccacgcgctcgcgcgagcatagccgacctggcgcgacggggcagccggtctcgtgtgctggtctgggtgctcgagccgcgggcctcgcacgacgtcccgacgctcgtaggagccgatgtggctcggggtcccgcacgggctcccgccacctgcgccccacccgtcgcagggccgcccagggttcgtgcgcgctcagcctctcccgctgccatcggcgaggcccgcagcctggtgtcagctcccactgacccgctcagcagcccctcagcagcccgggaggggacaaggggcaggaaacagcgggccggcgacgccgcggtggtcacaccgtggtgagggtccgggtcctgttgcgaggggcgttgtggccgcgtggcggaggcttgggggtttggatcggacggaggctggcgaacctggccaggctggtctcggagaaggacgggcgtcgggttggtcgtcgccgtcgccgtcgccgtcgccgtcgccgtcgccgtcgccgtcgccgtcgtcgtcctcgttagtatagtggtgagtatccccgcctgtcacgcgggagaccggggttcgattccccgacggggagacctgctgtcacttttttgccagatgggcggccccgggggcgctgacccctcggccccactctgcccaccgtgggatggcgtccaagagccgggctcgtgcggcctaatgccaggcatgccctcccgacaccgggccctcgggtaccttgccggccacctgcccagagctccgacggatgcctgggaacgcgccgtcctcccgaggaagcggcgggcgtcggagccggcggcgcgccactcgcgtggcctgagcgctgtgccaggcgggtccggatggtgacctggcggctcggagccgtcccgggtgctaccctggtccctggggccctcgaagcgtgcccgggccgtcccggtgcgccggatggcagcggtttggaggcgagagcgccccaccggccgggctgtgtgccggctgtgtgcgtgcgagaggcgcgggcgggacgcgccggtgagaagggcgcgcagcggcgcagccccggttgtgcttggcctgggcctgggccttggccctggcgttggctgtggggttgaggccgcggtggagccgctgcagggagttagttggtgcgcggccgctggctggtggcagtccccggcgtggtgtgcgtggcgtccttgtggttcggcgttggtggtatagtggtgagcatagctgccttccaagcagttgacccgggttcgattcccggccaacgcagcctgtccatgttttgccagggttcagggccgagggtggccagcctggaacctctcaccacccacccaccacccacctacctacctacctacctagttacctaacgcccgccccaaagaaggaggctctggcggcgggggaggagatctgccaggcgcaggcgtctaatcccggaggtggttcccgacttgccggcgaagcggtagacggcacagggcaccggacctctggcatctggcagggcaggggcagacgcaggcggcgggtggctggcaacggtctcgagcgggcgagccggcgagctggcgagcgggccgtccctcctgcagtctggctgtcagactggctgagaggctggcagtgtttctgtgtgcaggaccagaaagcggggaccgtcggttgtagactatgctccctggtggtctagtggttaggattcggcgctctcaccgccgcggcccgggttcgattcccggtcagggaagctagctattctcttcttcctctctgcactttagacgcctgcttttctctggccagcctccttggtcgtcgcacatctcctcccttttacccaacagcgcctctgctgctctactccactccgcttgcctctcttgctagcacacgcacacccctcacccgtaactccactcttttcccactcgcgcacaccgtatctgccggcacacacccgccacgcagcgctccggcacatgctttcttcccagacactcaccgagcccacggagtctccgcctcacactcccatgcctgcgctttggtctggaagaaaccctctagctggagggccccacctgccccacctgccccagatgccccacctgtcccacttgggccgcctgtttggatcaccatgtccctgtgacctctaccctgctcttcacaactcaacgaccggttcagataagtgtagcgatttttttcattatactttaggtgtccgtgtgtttgtacctatgagtgggtctctctctctctctctctctctctctctctctctctctctctctctctctctctcctgtgtgtgtgtgtgtgtgtgtgtgtgtgtgtgtgtgtgtgtgtgtgtatatctttcagaattccaggggatctcggtgattgtttatggtggtcgtttggtaagggatggattcgggtggagaacttgtatcgggtgggttgcggtgggaggtgtcagtgttccgcagaaggccaggtctgccagttggcagtccacagcacctggtgggatacgcttagccagctccgcgggggaggaggggagccaacagtgaacgagcccagccgaggcacggtttcctcgaaagcccctagagccctagagcggctggggagagctaaggccaagcctggcggttgtaacctgaaggcagggtttctgtgactcaatggtgtcggatggtgtggggcgtgggagaaggcttgcggacaccggcctgagtcctttcggaaagtggtgcggaacctttgcgcactccctgggtcccctgcgggttccccccggttctgaccttgccagccgatctgggactcagaggcagttctcctcgagcgcgaccgccggcatagtgggagatgccagcagatccttgggaaacacacacagtacctcctcccccacccgactctacgcctcccttgcaactgaagccctccggatccgggacacccgcagacgagagagagcagtgtggagcagcatctgggaagggtgtgtccggccggccgcgctgtccctccgtccccgggccagccgtgagctaggagaataggcgtgggaaacagaccctgggcaatcctatggcagcaggtgtccaagccaggccggaccgttgcgtgccaactgcatggttccgggcttggcgctgtgcggtttggatcgtgtcaacttggcgcttctggggagagggaatctaaactgagaacgacgtctgtgtgtacaacgagtgcctgcgatgatgagtgatggctgcgggacagcacacaaggctcagcgatggtgctcgggtgcgggtgggggtgggaggagagttgtggctaggggcgtgccacccctgcctgggcaagtggtgctgagctgtgtaggccagcaggctgagcaagccagtaggaagcactctcccacccagccggggctactgcatcagttcctgcctccgggttcccgtcccggggttccctctgggagggagctttaaggagaaccagcctgttcttctcccaagttgcttttgtccctggtgttggatcacaacaagagcagcctaactcggatccaaaggggtaccaggagtggggatttgatgtgacagacccagacccggatcgccgcgccctcgggaagattgcggaaggcctttgaagtgtgggtgtggaaagcaaagcaactgaacgctccaagctggctgcgctcctctgcctctaagggcgtgcttggaagagaatgcggagatcaacgcagaggatggaggcccggctctggctcgtcaagtggcagagggcagctgggaaataaatgcccgagagactgtgttgcggccattcgctgttgggaatggagaatctgtggtccggctccgctgaggttgaggctgaggccgaggaagcgtgtgtgatgaaagagccagagagctgaggcaccaaggtgaaagaaacctggctgtgcagggaccattgatccttgctggtgcaagcctggagccgagaatccagcgatgattattaaggcgacagcagcggccctgaggtgaaacgcccttggggtgcttcccgaatgtccttgttcagaggctgaacctcaggtggagccaggctgccgcacacattttgaaaacgcgcaggagtcagctatgtggtgattgatggcttcgaaggcgagcaaggatggaacctggagagcaacagaggcttggaattgggtggtgggtccgaggttccccaagagagtctgaaggttcagtggaagccacgcggcaaccggaaggggtggctcatggggaacagccaaacttggcacgaacaaccacgtggcaggctcagagtccccagaagaatgttcagcagcagctgtcatcgtccaacccgaggggcttggggatggatgcctggtacatgggacgaccaccgaggggagcagcagccttagaacgcagcccgttgaggcctgggagacaaactgcacataccgtaatggcagagctgcgggaatgtgactgtccacgccctctgtcacccacaagattgctagtgaacaggagatgtcagacactgggctttggaccgtggcgactttggttttgctttcctaggctcgggatcgcgccccgattctactttcctctccctgaaaaaccagtgtttaacttaaaaatgggaaaaaataaacttttgtatttttacactggaatttacagaagcccataggtatcacagtgaagggacaaaagagttgatgagggactttgcgtatcctagagatgcttgaatcttgaaagagactctgagacatttaacatttaaggagattgaacgttgaaggtttgaatgattaaatggtttcggcggcctctatgtagtttgtttgtggactattagttttctatgcttttcatttgtttatgctgtaaactgtttaacgacgcaaaggtgcactgcattcttttctgttgcgtttgtcattttgcctgcctaaaacaactgactggtctaataaggagctgacccgccaatagccagttgggagagggataggcggggctgccaggcggaaggtgagcggtgtgtttgtgtgttgtttgtgtgctgagatactggttgaaacgccctctgtccaatcacacccggagcccggcagctctcaagcatctagagccatgcaattgggaaggaggcacccttatccctacgcggactgttcctgcgccagggagcacaacaaagtctggggctagggccttgtctcgggctctggccaagagaggtccaccaagtgtccactctgagagagacagccaatctgtgtggggacagacagcactgtgcggtgtttgtggtgtgtgggtggagtcaggggctccttaaaagaaacatggggcgcttggagtgggcgagagtacgtcaagtccttttaagtggacttgaggaattggcgcgtgtggctgtggcacagctgatgcagtgagtggctggctcaagtggagcagaggagaccaggctggtgggctgcctgtggatcacgggaatgcagctggctgctggagcacttgccagggatgggcaggaggagatgtgtggcgccgagaaccttggagccggacattgcagtgtgcgtgcgtgcctcagaaccaaaagggactggtctctgcatgggccgggaatcgaacccgggcctcccgcgtggcaggcgagaattctaccactgaaccacccatgccatggacaacaccattccccacgaccgccgtcacagcccgtgctcgccgccggcagtcccaccaccagagagctccctccccttgccctggcaggaatgtcctgggccccggctctatacacccggcaggggagcgccagggacacggagaccagagtcccgggtccacactgatggtgagctctcgggatgagccgcgcctctcccgcccggacgccagggccccaagtcaagcacgccgctgcgggcgagccagcggcccggcggccggccgggtgtctgtgcgtgcgcccagcgtctgccaggtgtgcgtagggaacggccacccgcgcagagcagatgcctcgacgaccccagcccgacagcaggggcgctgtgggcgtctcccgcacgagtttggagggaacggaatgggcgagaaagagctggtggacgcgagggctgggcgatcagggtgggcggagtcgcgcgtgggtggacgcgggttccctaaagtccctggctggccggcgggctggcgggctgctcccttgccgcctgccggggtgctcaggaccggcggcctccttcccgcaccctccccgacgaaaggcgtagcaagatgaccaccagtcgccccatcagaacccccctccattagtagctggtgggttttgagaggagggcgctcctgcgcgtacaggtgtgctgcgtaatggaaatttgtcgggtgccaggcgagaggccgggaggaggggttgtggaaacaggcgagagatgcggtttctagggttggggtttgcaaaacaaaacaccaaaaaatcaaagttgtcaggagtgggattcgaacccacgcctccaggggagactgcgacctgaacgcagcgccttagaccgctcggccatcctgactgggcttttgtgtcggaggccactttcctggctggcaccagtccccaacgggattatccctgcccatccggtttgaggacgaggcgttgcttgctagactcgtgatgctcctagttcccaatgtcgctctggtttcggacaggctctctgtatctgctccccatccgacccagtgccgcgattgttttacaccagcctctcctgataccttcggcgaggctttcagccatttattagtggtcagagttcacatcaccccttgctcagccagagccctatggatggtttggttactttgtgttaagggtcggtgcataggttggaggggcatcctttccttgtccaggagggtgtaggcatttgtgcggatgtctatggagtaccagaccgagcctggtttgacctttatggtgttgcaggtaggttaattctcagtgctcgattggatctgagaatcctgtggcgatgataatgatagcaccatcacaattctcgattaatttttggtcactgttttgtacaatttactcaaatatcaagaagtaaaatatctttatctagtatttctcaaccatgtataaccgtctgtatttgatgtatgctttgaacattttgtttcttctgagttttggtttgatgttttttttttttttttttttttttttttttttttttttttttcctgagtcccgctcctgcagagttctgaagttcaggactgaggtgtgaattttttaaaatgaagagtctgaccgctggttgtatttgaaacacagcgctccaaatagcacgatctgtctcatttgtaatgccttttaaagtatttattatgaattcaagcatgggtagtttccattcatttctctttaatcattttccaagctattaacatttatccatttactttcttttttacttcctcattcccttgtcctcattaactatcctcttccaggtatgtaagcatgaaatttaattattccaacccaaacaattatatctacccaggtgcatcctatttgtactttttcaggctgtttgtaaacatgagatttaaacaaagacattcaaacactgtgattagtccttaaccatacgatgctttcatatttttgtagtgagcagagagtatgatctcatacctagaatagtatttttcaggttaagtcaatttcttaaaggtctgcatactgtttttatgtgagcgtcacttgcaatcctgttctgtgtacattcccagaatggcaatgattactacctcacttttaactattgagaccaagtttctattctttctggaagtttctacttgtatttttacttcgaagggaactgggagatttagattcttttcttgatattttggcattgggaaaatgtctgacctttcatgccctggtaccagagccatgtctggccttaatgcccattatctttccttttatgttctataaattcttaatgtcatcttaatgtcattctctctctctctctctctctctctctctctctctctctctctctctcagaacatttaagtaagcaaccttagtgagttcattaaccttaatgaatccctcctgcttgctcaaggtgactgcaaaggcagtcaggggcaacttgaggaactgatttctgtcatagactgcaaagaggcttaatttccttgcagaaactttagaaaaaatttctgcttttgttcccagtaagctcagtcacaatcacaactgacaaagcaaaattaagaattagcatagaagccggacattggtgtctcacacctttaatcccaacactcgggaggcaggggcaggcagatctctgtgagttcgaggccagcctggtctccagagcgagtgccaggatagctccaaagctacacagagaaaccctgtctcgaaaaaacaaaaaacaaaacataaaaaaaagaattagcatagaaaaagcatgggaaaagttacaaaagcctgatgcctgtgagctgcctgagatcagagcaggggtctgtagtattgcctctataggtccttaccaggtgggcaggattctccaaagggcttggcataaggagttccatttgcaaaacatttatgggccatttcaggaggttacaacatggcttctgccagtttttgtccttatatttttcaatattgtaaaaacaccccttttagataaaaacaaaaaactactttagtttttcatgagtcagaaacatgtctaaccccaggaaaataatgacacaaaatctgaaaaagaaaaatgtttctcaaggacaatcacagtctttgatgcattcccaattttctgtctatttgtgaagtacttgcagcaatgaaggaagatttcatattccattttaatgatactttgcctctattactgattttgttcatgttatgttgctccaacatttaaactcttgtagatcacaaacatcatcttaaattagtcgccatatgtaagatatttacttatgtaaggagtacttaaatacaaaatagtaagtatgactgtagaggaaaaaggtaactaagctttgtacatgtctggtgtggtggcaccaacccatggaaagtagacaccagaggaggatcagagtttaaaatcatcggaagatactgaagtgagatttactaaataagacagtctaaaattaattaatggcttgtttgattaatgtatatccataggcaggagagatgactcagtggttcagagcattaactcttttccagtgaagcctgattcaattcctggtcccaacatagggtctcacaacccactggaactcaacttcctaggaatttgacgccctctctggactccatttggtacccatgcacacagaataagcaaccagacacataaaaataaacaacatgatattttttaaaaagtttatcagacagcagatttaggggtgtatattattatctattttatttctcttatgatgctgagtctggtatgcaggtactgtcactgactcataccaacaaacataaacctttacagtgaaataggatattggagcagatatttaaaacaagaaggaaagccataatagactgccatgagcctaggcgccccatcacacccacgaaggaacaggcatggaatgcccatatcagggaggtgagcaaacacaggagtgcttgtactgtcaggatggccgagcggtctaaggcgctgcgttaaggtcgcagtctcctctggaggcgtgggttcgaatcccacttctgacaggtttgtttactttttaccacacaaactgaaaccagagaaacgatatcacatacctcctatagaaaaccactccattgtcacccatctcttcatgcacgcaacttcccaggtcaaacaattatggagaaaaaccatctagtaacacaaaattctgttggggagcatttggtaaaggctttgcttgctaccagttgggaagagatcacagaaaatggaataacagtgcctttcctgagcattggagccacagggcagccacgcagttgcaagtgccttctggaagcagaggccttcgtgcacacgaacgtccaacacctagacttgttcgtgtagtgtttggagcaataactttcgggcccagtaccagtacctcttgctgattccatttcctccaactcctgcagaagacacccaccgcgcccatcttgctcctcagtgctcttcgaggcagcttctctgctggtggcctttcatgcgcacaattgcgttaggcttcgtgtacgaaaagatactcacccacccacgggccccaacactagctggcctgcaggaaaacgcagaggaaatgcagttaatgcggcctgagtttatatcaaccacttctaatccctgaccacctgaaaaggacccgatgaacccacagaagaggcttttcctgtgtccaaacttaacacacattagcaaatagagaggtaacacagagaggagggtgcatggtggtggcggtggcggtggggagtcagcttgggagcgagcagggaaggagggggttgacatgggattaccaaattaaaagagaagaggttcactcagagagcctaagtatgaacctggggctttcctctcccatgtacaggctgcttctcccattcaaccaaaggacattttcacaaggatggaaacaatacgacacttcaaacaaaagcccaatcaaacctacgaagttttagaataactttgactctccttgaccctctaagcctctcacacctttgctcctctcgatcccactgtgtaaccccgtattttctaactctctctcgctttcatactgacacacatgggtataaacacaaacatacacacacacacacacacacacacacacacacacacacacacacacacaaaatacatacaaacaaaagatatctggtcacttgttaattaatcacacattatcctaagcatcagcctcaacctcaagggggaggatcaaagattcaccattcccaacagcgaatggccgcaacacagtctctcgggcatttatttcccagctgccctctgccacttgacgagccagagccgggcctccatcctctgcgttgatctccgcattctcttccaagcacgcccttagaggcagaggagcgcagccagcttggagcgttcagttgctttgctttccacacccacacttcaaaggccttccgcaatcttcccgagggcgccgcgatccgggtctgggtctgtcacatcaacaccccactcctggtacccctttggatccgagttaggctgctcttgttgtgatccaacaccagggacaaaagcaacttgggagaagaacaggctggttctccttaaagctccctcccagagggaaccccgggaccggaacccggaggcaggaactgatgcagtagcccgggctgggtgggagagtgctccctactagcttgctcagcctgctggcctacacagctcagcaccacttgcccaggcaggggtggcaggcccctagccacaactctcctcccacccccacccgcacccgagcaccatcgctgagccttgtgtgctgtcccgcagccatcactcatcttcgccggcactcgctgtacacacagacgtcgttctcagtttagattccctctccccagaagcgccaagttgacacgatccaaaccgcacagcgccaagcccggaaccctgcagttggcacgcaacggtccggcctggcttggacacctgctgccataggattgcccagggtctgtttcccacgcctattctcctagctcacggctggccccgggacggagggacagcgcggccggccggacacacccttcccagatgctgctccacactgctctctctcgtctgcgggtgtcccggatccggagggcttcagttgcaagggaggcgtagagtcgggtgggggaggaggtactgtgtgtgtttcccaaggatctgctggcatctcccactatgccggcggtcgcgctcgaggagaactgcctctgagtcccagatcggctggcaaggtcagaaccgaggggaaccggcaggggacccagggagtgcgcaaaggttcctcaccactttcccgactcaggccggtgtccgcaagccttctcccacgccccccaccctccgacaccatggagccgcagaaaccctgccttcaggttacaaccgccaggcttggccttagctctccccagccgctctagggctctaggggctttcgaggaaaccgtgcctcggctgggctcgttcactgttggctcccctcctcccccgcagagctggctaagggtatcccaccaggtgctgtggactgccaactggcagacctggccttctgccggacactgacacctccccaccgcaccccacccgatacaagttctccacccgaatccatcctttaccaaacgaccaccataaacaatcaccgagatcccctggaattttccaagatacacaaaaacacacacgagagagagagcgcgagagcgtgagcgagagagaaacagagagagagtgacagacagacagagagagacagacagacagagagagagagagagagagagagagagagagagagagacccactcataagtacaaacacacggacacctaaagtataatgaaaaaaaatcgctacacttatctgaactggtcgttgagttgtgaagagcagggtagaggtcacagggacatggtgatccaaacaggcggcccaagtgggacaggtggggcatctggggcaggaggggcaggtggggccctccagctagagggtttcttccagaccaaagcgcaggcatgggagtgtgaggcggagactcggtgggctcggtgagtgtctgggaagaaagcatgtgccggagcgctgcgctgtgtgtcgggtgtgcgcgagtgggaaaagagtggagttacgggtgaggggtgtgtgttggtgtgcgtgtgctagcaagagaggcaagcggagtggagtagagcagcagaggcgctgttgggtaaaagggagacgaggtgcgacgaccaaggaggctggccagagaaaagcaggcgtctaaagtgcagagaggaagaagagaagagctggcttccctgaccgggaatcgaacccgggccgcggcggtgagagcgccgaatcctaaccactagaccaccagggagcatagtctacaaccgacggtccccgctctcccctgctggacacagacaccctgccagcctctcagccagtctgacagccagactgccggacggacggcccgctcgccagctcgccggctcgcccgctcgtgaccgttgccagccacccgccgcctgcgtctgcccctgccctgccaggtgccagatgccagatgccagatgccagatgccagatgccagaggtccggtgcccggtgccctctgccgcttcgccggcaagtcgggaaccacctccgggactagacgcctgcgcctggctgatctcctccccggccgccagagcctccaaacgtctagcgtctccttctttggggcgggcggtaggtagctagctaggtgggtgggtgggtgggtgagtaggtaggtaggtaggtgggtgggtgagtgggtggttgtgtaggtaggtaggtaggtaggtaggtaggtaggtaggtaggtaggtaggtaggtcggtctcctggacaaggtaaggtgagaggttccaggctggccaccctcggccctgaaccctggcaaaacatggacaggctgcgttggccgggaatcgaacccgggtcaactgcttggaaggcagctatgctcaccactataccaccaacgctgtgccccaaggacgccacgcacaccacgccggggactgccaccagccagcggccgcgcaccaactaactccctgcagcggctccaccgcggcctcaaccccacagccaacgccagggccaaggcccaggcccaggccaagcacaaccggggctgcgccgctgcgcgcccttctcaccggcgcgtcccgcccgcgcctctcgcacgcacacagcccggcacacagcccggccggtggggcgctctcgcctccaaaccgctgccatccggcgcaccgggacggcccgggcacgcttcgagagccccagggaccagggtagcacccgggacggctccgagccgccaggtcaccatccggacccgcctggcacagcgctcaggccacgcgagtggcgctccgccggctccgacgcccgcaacttcctcgggaggacggcgcgttcccaggcatccgtcggagctctgggcaggtggccggcaaggtacccgagggcccgagggcgggagggcatgcctggcagtaggccgcacgagcccggctcttggacgcggtcccgcgggcgcgggcggcagagtgggaccgaggggtcagcgccccccggggccgcccatcgggcaaaaatgtgacagcttgtctccccgtcggggaatcgaaccccggtctcccgcgtgacaggcggggatactcaccactatactaacgaggacgacgacggcgacggcaaccacgacgaccaacccgaagcccgtccttctccgagaccagcctggccaggttcgccagcctccgtccgatccaaacccccaagcctccgccacgcggccacaacgcccctcgcaacaggacccggaccctcaccacggtgtgaccaccgcggcgtcgccggcccgctgcctcctgccccttgtcccctccctggctgctgaggggctgctgagcgggtcagtgggagctgacaccaggctgcgggcctcgccgatggcagcgggagaggctgagcgcgcacgaaccctgggcggccctgcgacgggtggggcgcaggtggcgggagcccgtgcgggaccccgagccacatcggctcctacgagcgtcgggacgtcgtgcgaggcccgcggctcgagcacccagaccagcacacgagaccgtctgccccgtcgcgccaggtcggctatgctcgcgcgagcgcgtgggcgcctggtgccagccagtggagccgcctggcggcccgacccgccgtcaggatggccgagcggtctaaggcgctgcgttcaggtcgcagtctcccctggaggcgtgggttcgaatcccactcctgacaacattgttttgtgttgttgttgtttgtgcgtgtatgtgcgtgtgcgcgtgcgcgcgcgtgtgcgcgtgcgtgcgtgtgtttgtgtgtttgtgtgtgtgtgtgtgtgtgtgtgtgtgtgtgtgtgtgtgtgtgtgtgtgttttgttttgcaacctccacctggagagaccgcctctctcgcctccttccacaactcctccggcgccgcctctcgcctgactccagtcaaccttccctgacacagcacttctgtgcgcgcaggagcgccctcctctcaacacccaccagctactactggaggggggttctgatggggcgcctggtggtcgtcttgctccgccttgagtccgggagggtgcgggaaggaggcggctggtcctgagcacgctggcaggcggcaaagcccgcccgcccgccgggtgcgagagcctttcggggaaccctcgtccacccacgcgcgactccgcccaccctgatcgcccagccctcgcgtccaccagctctttctcgcccattccgttccctccaaactcgtgcgggagacgcccacggcgcccctgctgtcgggtggggtcgtcgaggcctctgctctgcgcgggtgaccgttccctacgcacacctggcagacgctgggcgcacgcacagacacccggccggccgccgggccgctggctcgcccgcagcggcgggcttgacttggggccctggcgtccgggcgggagaggcgcggctcaccccgcgagctcaccgtcagtgtggacccgggactctggtctccgtgtccctggcgctcccctgccgggtgtatggagccggggcccaggaccttcctgccagggcaagaggagggagctctccggtggtgggaccttcggcggcgagcacgggctgtgacggcggtcgtggggaatggtgttgtccatggcatgggtggttcagtggtagaattctcgcctgccacgcgggaggcccgggttcgattcccggcccatgcagagaccagtcccttttggttctgaggcacgcacgcacactgcaatgtctggctccacatctcctcctgcccaaccctggcgcgggctccagcgccagctgcattcccgtgatccacgggcagcccaccagtctagtctcctctgctccacttgagccagccactccctgcatcagctctgccacagccacccgcgccagttcctcaagtccacttcaaaggacttgacgtactcatcctcccgcaggctctcgcccacaccaagcccccccatgtttcttttaaggcgccccggactccacccacaccccacacccaccgcccagtgctgtctgtccctacacagactggctgtctctctcagagtggacacttggtggacctctcttggccggagcccgagacacggccctagccccagactttgttgtgctccctggcgcaggaacagtccgcgtagggacgagggtgcctcctttcccaatcgcatggctctagacccctgagagctgcccggctccggatgggattggacagaggacggatcttcccagtctctcagcacacaaacaggtcgctggtttgtatgttgtctgcgttcatccccaaaacctcattttattcccaataacaccatataaaacagatagaactgtagttgttttattttttctttctgttttctttaatatggtttactcttggggacacgccacccaggacccaagtcaatacaaggagactccttactcagaaatgcgccgccttagcttgccttgtatctagccagctttctttccttaacctaaattgtcccatctcccccgcatttcttttttctttctttctttcttccttcctttctttctttctttctttctttctttctttctttctttctttctttctttgtgtttttctctgtttttgcctctgggcttctccctttcactcttctacttctctttccttcttactgagtggctggctgggtggctaggtgactggcccctggtgtcctcctctccttctcctcctctcaccgatcaccttacttctgctgtttcttctctccgcctggcagcccctcctatccctctcccaactggctattggcgggtcagctccttattagaccagtcaggtgttttaggcaggcaaaatgacaaacgcaacagaaaagaatgcagtgcacctttgcatcgttaaacaaatagtttacagcataaacgaatgaaatgcaaggaaaaataataatccaaaacaaagaacgacatagatgccgccagcaccatttaatcattcaaaccttcaacgttcactctccttaaatcacccagagtctctttcaagattcaaagcatctctaggatatgcaaagtccctcagcaactcttttgtcccttcactgtgctacctatgggcttctgcaaattccaatgtaaaaaaaaaaaaagttggttttttttttttgccatttttaagttaaacactggttttgcagggagaagaaagtagaatcggggcgcgatcgcgagcataggaaagcaaaaccgaagtcgccacagtccaaagcccagtgtctgacatctcctgttcactagctatctcttgggtgacagagggcgtggacagtcacattcccgcagctctgccatcacggcatgtgcagtttgtctcccaggcctagacgggctgcgttctaaggctgctgctcacctcggtggttgtcccatgatacaggcctccatccccaagaccctcgccttggccggtgacagccgctgctgaactttcttctggggactctgagcctgccacgtggttgttcgtgccaagtttggctgttccccatgagccaccccttccggttgccgcgtggcttccactgaaccttcggactctcttggggaacctcggacccaccacccaattccaagcctctgttgctctccaggttccatccttgctcgccttcgaagccatcaatcaccacatagctgactcctgcgcgttttcaaaatgtgtgcggcagcctggctccacctgaggttcagcctctgaacaaggacattcgggaagcaccccaagggcgtttcacctcagggccgctgctgtcgccttaataatcatcgctggattctcggctccaggcttgcaccagcaaggatcaatggtccctgcacagccaggtttctttcaccttggtgcctcagctctctggctctttcatcacacacgcttcctcggcctcagcctcaacctcagcggagccggaccacagattctccattcccaacaccgaatggccgcaacacagtctctcgggcatttatttcccagctgccctctgccacttgacgagccagagccgggcctccatcctctgcgttgatctccgcattctcttccaagcacgcccttagaggcagaggagcgcagccagcttggagcgttcagttgctttgctttccacacccacacttcaaaggccttccgcaatcttcccgagggcgccgcgatccgggtctgggtctgtcacatcaacaccccactcctggtacccctttggatccgagttaggctgctcttgttgtgatccaacaccagggacaaaagcaacttgggagaagaacaggctggttctccttaaagctccctcccagagggaaccccgggaccggaacccggaggcaggaactgatgcagtagcccgggctgggtgggagagtgctccctactagcttgctcagcctgctggcctacacagctcagcaccacttgcccaggcaggggtggcaggcccctagccacaactctcctcccacccccacccgcacccgagcaccatcgctgagccttgtgtgctgtcccgcagccatcactcatcttcgccggcactcgctgtacacacagacgtcgttctcagtttagattccctctccccagaagcgccaagttgacacgatccaaaccgcacagcgccaagcccggaaccctgcagttggcacgcaacggtccggcctggcttggacacctgctgccataggattgcccagggtctgtttcccacgcctattctcctagctcacggctggccccgggacggagggacagcgcggccggccggacacacccttcccagatgctgctccacactgctctctctcgtctgcgggtgtcccggatccggagggcttcagttgcaagggaggcgtagagtcgggtgggggaggaggtactgtgtgtgtttcccaaggatctgctggcatctcccactatgccggcggtcgcgctcgaggagaactgcctctgagtcccagatcggctggcaaggtcagaaccgaggggaaccggcaggggacccagggagtgcgcaaaggttcctcaccactttcccgactcaggccggtgtccgcaagccttctcccacgccccccaccctccgacaccatggagccgcagaaaccctgccttcaggttacaaccgccaggcttggccttagctctccccagccgctctagggctctaggggctttcgaggaaaccgtgcctcggctgggctcgttcactgttggctcccctcctcccccgcagagctggctaagggtatcccaccaggtgctgtggactgccaactggcagacctggccttctgccggacactgacacctccccaccgcaccccacccgatacaagttctccacccgaatccatcccttaccaaacgaccaccataaacaatcaccgagatcccctggaattttccaagatacacaaaaacacacacgagagagagagcgcgagagcgtgagcgagagagaaacagagagagagtgacagacagacagagagagacagacagacagacagagagagagagagagagagagagagagagagagagacccactcataagtacaaacacacggacacctaaagtataatgaaaaaaaaatcgctacacttatctgaactggtcgttgagttgtgaagagcagggtagaggtcacagggatatggtgatccatacaggtgacccaggtggggcaggtggggcaggtggggccctccagctagagggtttcttccagaccaaagcgcaggcatgggagtgtgaggcggagactcggtgggctcggtgagtgtctgggaagaaagcatgtgccggagcgctgcgctgtgtgtcgggtgtgcgcgagtgggaaaagagtggagttacgggtgaggggtgtgtgttggtgtgcgtgtgctagcaagagaggcaagcggagtggagtagagcagcagaggcgctgttgggtaaaagggagacgaggtgcgacgaccaaggaggctggccagagaaaagcaggcgtctaaagtgcagagaggaagaagagaagagctggcttccctgaccgggaatcgaacccgggccgcggcggtgagagcgccgaatcctaaccactagaccaccagggagcatagtctacaaccgacggtccccgctctcccctgctggacacagacaccctgccagcctctcagccagtctgacatccagactgccggacggacggcccgctcgccagctcgccggctcgcccgctcgtgaccgttgccagccacccgccgcctgcgtctgcgtctgccctgtcagatgccagatgccagatgccagatgccagatgccagaggtccggtgcccggtgccctctgccgcttcgccggcaagtcgggaaccacctccgggactagacgcctgcgcctggctgatctcctccccggtcgccagagcctccaaacggtggtagcgtcttcctttttgtaggcggctggttaggatagcgatgactaggtgggtgggtgggtgggtgagtgggtggttgtgttaggtagtaggtaggtgggtgggatggggggctgagtgagttgtttgtgtaggttaggtagggatagagagcctggggggtagtcgtcgagtgggtagttgtgtaggtaggtaggtaggtaggtaggtaggtaggtaggtaggtaggtaggtaggtcggtctcctggacaaggtaaggtgagaggttccaggctggccaccctcggccctgaaccctggcaaaacatggacaggctgcgttggccgggaatcgaatccgggtcaactgcttggaaggcagctatgctcaccactataccaccaacgctgtgccccaaggacgccacgcacaccacgccggggactgccaccagccagcggccgcgcaccaactaactccctgcagcggctccaccgcggcctcaaccccacagccaacgccagggccaaggcccaggcccaggccaagcacaaccggggctgcgccgctgcgcgcccttctcaccggcgcgtcccgcccgcgcctctcgcacgcacacagccggcacacagcccggccggtggggcgctctcgcctccaaaccgctgccatccggcgcaccgggacggcccgggcacgcttcgagagccccagggaccagggtagcacccgggacggctccgagccgccaggtcaccatccggacccgcctggcacagcgctcaggccacgcgagtggcgctccgccggctccgacgcccgcaacttcctcgggaggacggcgcgttcccaggcatccgtcggagctctgggcaggtggccggcaaggtacccgagggcccgagggcgggagggcatgcctggcagtaggccgcacgagcccggctcttggaggcggtcccgcgggcgcgggcggcagagtgggaccgaggggtcagcgccccccggggccgcccatcgggcaaaaatgtgacagcttgtctccccgtcggggaatcgaaccccggtctcccgcgtgacaggcggggatactcaccactatactaacgaggacgacgacggcgacggcaaccacgacgaccaacccgaagcccgtccttctccgagaccagcctggccaggttcgccagcctccgtccgatccaaacccccaagcctccgccacgcggccacaacgcccctcgcaacaggacccggaccctcaccacggtgtgaccaccgcggcgtcgccggcccgctgcctcctgccccttgtcccctccctggctgctgaggggctgctgagcgggtcagtgggagctgacaccaggctgcgggcctcgccgatggcagcgggagaggctgagcgcgcacgaaccctgggcggccctgcgacgggtggggcgcaggtggcgggagcccgtgcgggaccccgagccacatcggctcctacgagcgtcgggacgtcgtgcgaggcccgcggctcgagcacccagaccagcacacgagaccgtctgccccgtcgcgccaggtcggctatgctcgcgcgagcgcgtgggcgcctggtgccagccagtggagccgcctggcggcccgacccgccgtcaggatggccgagcggtctaaggcgctgcgttcaggtcgcagtctcccctggaggcgtgggttcgaatcccactcctgacaacattgttttgtgttgttgttgtttgtgcgtgtatgtgcgtgtgcgcgtgcgcgcgcgtgtgcgcgtgcgtgcgtgtgtttgtgtgtgtgtgtgtgtgtgtgtgtgtgtgtgtgtgtgtgtgtgtgtgtgtgttttgttttgcaacctccacctggagagaccgcctctctcgcctccttccacaactcctccggcgccgcctctcgcctgactccagtcaaccttccctgacacagcacttctgtgcgcgcaggagcgccctcctctcaacacccaccagctactactggaggggggttctgatggggcgcctggtggtcgtcttgctccgccttgagtccgggagggtgcgggaaggaggcggctggtcctgagcacgctggcaggcggcaaagcccgcccgcccgccgggtgcgagagcctttcggggaaccctcgtccacccacgcgcgactccgcccaccctgatcgcccagccctcgcgtccaccagctctttctcgcccattccgttccctccaaactcgtgcgggagacgcccacggcgcccctgctgtcgggtggggtcgtcgaggcctctgctctgcgcgggtgaccgttccctacgcacacctggcagacgctgggcgcacgcacagacacccggccggccgccgggccgctggctcgcccgcagcggcgggcttgacttggggccctggcgtccgggcgggagaggcgcggctcaccccgcgagctcaccgtcagtgtggacccgggactctggtctccgtgtccctggcgctcccctgccgggtgtatggagccggggcccaggaccttcctgccagggcaagaggagggagctctccggtggtgggaccttcggcggcgagcacgggctgtgacggcggtcgtggggaatggtgttgtccatggcatgggtggttcagtggtagaattctcgcctgccacgcgggaggcccgggttcgattcccggcccatgcagagaccagtcccttttggttctgaggcacgcacgcacactgcaatgtctggctccacatctcctcctgcccaaccctggcgcgggctccagcgccagctgcattcccgtgatccacgggcagcccaccagcctagtctcctctgctccacttgagccagccactccctgcatcagctctgccacagccacccgcgccagttcctcaagtccacttcaaaggacttgacgtactcatcctcccgcaggctctcgcccacaccaagcccccccatgtttcttttaaggcgccccggactccacccacaccccacacccaccgcccagtgctgtctgtccctacacagactggctgtctctctcagagtggacacttggtggacctctcttggccggagcccgagacacggccctagccccagactttgttgtgctccctggcgcaggaacagtccgggtagggacgagggtgcctcctttcccaatcgcatggctctagacccctgagagctgcccggctccggatgggattggacagaggacggatcttcccagtctctcagcacacaaacaggtcgctggtttgtatgttgtctgcgttcatccccaaaacctcattttattcccaataacaccatataaaacagatagaactgtagttgttttattttttctttctgttttctttaatatggtttactcttggggacacgccacccaggacccaagtcaatacaaggagactccttactcagaaatgcgccgccttagcttgccttgtatctagccagctttctttccttaacctaaattgtcccatctcccccgcatttcttttttctttctttctttcttccttcctttctttctttctttctttctttctttctttctttctttctttctttctttgtgtttttctctgtttttgcctctgggcttctccctttcactcttctacttctctttccttcttactgagtggctggctgggtggctaggtgactggcct

SEQ ID NO: 119 - DNA, 5000 bp, synthetic construct
  source 1..5000: mol_type = other DNA; note = Hot spot 2 - 5000 base 5' end sequence of SEQ ID NO: 118
gtaggaaggtaatccttggtactagctttaggaatgtaatccttggtgctggctttaggaaggtaatccttggtgctagctttaggaaggtaatccttagtgctgactttaggaatataatcgttggtgctagctttaggaaggtaatccttggtgctagctttaggaatgcaatccttagtgctagctttaggaatgtaatccttggtgctggctttaggaaggtaatccttggtactagctttaggaatgtaatccttggtgctagctttaggaatgcaatccttggtgctaggtttaggaatgcaatccttggtgctagctttaggaaggtaatccttggtgctgactttaggaatataatccttggtgctagctttaggaatgtaatccttggtgctagctttaggaatgtattccttggtgctagctttaggaatgtaatccttggtgctgggtttaggaaggtaatccttggtactagctttaggaatgtaatccttggtgctagctttaggaaggtaatccttggtgctagctttaggaaggtaatccttagtgctgactttaggaatataatccttggtgctagctttaggaaggtaatccttggtgctagctttaggaatgcaatccttagtgctagctttaggaatgtaatccttggtgctggctttaggaaggtaatccttggtactagctttaggaatgtaatccttggtgctagctttaggaatgcaatcgttggtgctaggtttaggaatgcaatcctttgtgctagctttaggaaggtaatccttggtgctagctttaggaatgtaatccttggtgctagctttaggaatgtattccttggtgctatctttaggaatgtaatccttggtgctgggtttaggaaggtaatccttggtactagctttaggaatgtaatccttggtgctagctttaggaaggtaatccttggtgctagctttaggaaggtaatccttagtgctgactttaggaatataatccttggtgctagctttaggaaggtaatccttggtgctagctttaggaatgcaatccttagtgctagctttaggaatgtaatccttggtgctggctttaggaaggtaatccttggtactagctttaggaatgtaatccttggtgctagctttaggaatgcaatccttggtgctaggtttaggaatgcaatccttggtgctagctttaggaaggtaatccttggtgctagctttaggaatgcaatccttggtgctagctttaggaatgcaatccttggtgctagctttaggaatgtaatccttggtgctggctttaggaaggtaatccttggtactagctttaggaatgtaatccttggtgctagctttaggaatgcaatccttggtgctaggtttaggaatgcaatccttggtgctagctttaggaatgcaatccttggtgctagctttaggaatgcaatccttggtgctcgctttaggaaggtaatccttggtgctagctttaggaatgcaatccttggtactagctttaggaaggtaatccttggtactagctttaggaaggtaatccttggtactagctttaggaatgtaatccttggtgctagctttaggaatgcaatccttggtgctagctttaggaatgcaatccttggtgctagctttaggaaggtaatccttggtactagctttaggaaggtaatccttggtactagctttaggaatgtaatccttggtgctagctttaggaatgcaatccttggtgctagatttaggaatgcaatccttggtgctagctttaggaaggtaatccttggtgctagctttaggaatgcaatccttggtactagctttaggaaggtaatccttggtactagctttaggaatgtaatccttcgtgctagctttaggaaggtaatccttggtgctagctttaggaatgtaatccttggagctagctttaggaatgcaatccttggtgctagctttaggaatgtaatccttggtgctgactttaggaatgtaatccttggtgctagctttaggaaggtaatccttggtgctagctttagtaatgcaatccttagtgctagctttaggaaggtaatccatggtgctagctttaggaatgcaatccttagtgctagctttaggaaggtaatccttggcgctagttttaggaatgcaatccttggtactagctttaggaaggtaatccttggtactagctttaggaaggtaatcctttgtactagctttaggaatgtaatccttggtgctagctttaggaatgcaatccttggtgctagctttaggaaggtaatccttggtgctgactttaggaatgtaatccttggtgctagctttaggaaggtaatccttggtgctgactttaggaatgcaatccttggtgctagccttaggaaggtaatccttggtgctgactttaggaatgtaatccttggtgctagctttgggaaggtaatccttggtgctagctttaggaaggtaatccttggtgctagctttaggaatgtaatccttggtgctagctttaggaatgcattccttggtgctagctttaggaatgtaatccttggtgctgggtttaggaaggtaatccttggtgctagctttaggaaggtaatccttggtgctagctttaggaatgtaatccttggtgctagctttaggaatgtattccttggtactagctttaggaaggtaatccttggtgctagctttaggaatgcaatccttggtgctttaggaaggtaatccttggtactagctttaggaataatccttggtactagctttaggaatgtaatccttggtgctagctttaggaatgcaatccttggtagctttatcccttggtgctagctttaggaaggtaatccttggtaagccttggtgctagctttaggaatgtattccttggtgctagctttaggaatgtaatccttggtgctgggtttaggaaggtaatccttggtactagctttaggaatgtaatccttggtgctggctttaggaaggtaatccttggtgctagctttaggaaggtaatccttagtgctgactttaggaatataatcgttggtgctagctttaggaaggtaatccttggtgctagctttaggaatgcaatccttagtgctagctttaggaatgtaatccttggtgctggctttaggaaggtaatccttggtactagctttaggaatgtaatccttggtgctagctttaggaatgcaatcctaggtttaggaatgcaatccttgtgctagctttaggaaggtaatccttggtgctagctttaggaatgtaatccttggtgctagctttaggaatgtaatccttggtgctagctttaggaatgtaatccttggtgctagctttaggaatgcaatccttggtgctagctttaggaaggtaatccttggtgctagctttaggaatgtaatccttggtgctagctttaggaatgcaatccttggtgctagctttaggaatgcaatccttggtgctagctttaggaatgtattccttggtgctagctttaggaatgtaatccttggtgctgggtttaggaaggtaatccttggtactagctttaggaatgtaatccttggtgctagctttaggaaggtaatccttggtgctagctttaggaaggtaatccttagtgctgactttaggaatataatccttggtgctagctttaggaaggtaatccttggtgctagctttaggaatgcaatccttagtgctagctttaggaatgtaatccttggtgctggctttaggaaggtaatccttggtactagctttaggaatgtaatccttggtgctagctttaggaatgcaatccttggtgctaggtttaggaatgcaatccttggtgctagctttaggaaggtaatccttggtgctagctttaggaatgtaatccttggtgctggctttaggaatgcaatccttggtgctaacttaggaatgtaatccttggtgctagctttatgaatgcaatccttggtgctagctttaggaaggtaatccttgttgctgagtttaggaatgtaatccttggtgctagctttaggaaggtaatccttggtgctggctttaggaatgcaatccttggtgctagctttaggaatgcaatccttggtgctagctttaggaatgtaatccttggtgctgctttaggaatgtaatccttggtgctggctttaggaaggtaatccttggtactagctttaggaatgtaatccttggtgctagctttaggaatgcaatccttggtgctaacttaggaaggtaatccttggtgctgactttaggaatataatacttggtgctagctttaggaaggtaatccttggtgctagctttaggaatgcaatccttggtgctagctttaggaatgtaatccttggtgctggctttaggaaggtaatccttggtgctagctttaggaatgtaatccttggtgctagctttaggaatgcaatccttggtgctaggtttaggaatgcaatccttggtgctagctttaggaaggtaatccttggtgctagctttaggaatgtaatccttggtgctggctttaggaatgcaatccttggtgctaacttaggaatgtaatccttggtgctagctttatgaatgcaatccttggtgctagctttaggaaggtaatccttgttgctgagtttaggaatgtaatccttggtgctagctttaggaaggtaatccttggtgctggctttaggaatgcaatccttggtgctagctttaggaatgcaatccttggtgctagctttaggaatgtaatccttggtgctgactttaggaatgcaatatgtggtgctagatttaggaatgtaatccttggtgctggctttaggaaggtaatccttggtgctagctttaggaatgtaatccttggtgctagctttaggactgcaatgcttggtgcta

SEQ ID NO: 120 - DNA, 4999 bp, synthetic construct
  source 1..4999: mol_type = other DNA; note = Hot spot 2 - 5000 base 3' end sequence of SEQ ID NO: 118
gccttagctctccccagccgctctagggctctaggggctttcgaggaaaccgtgcctcggctgggctcgttcactgttggctcccctcctcccccgcagagctggctaagggtatcccaccaggtgctgtggactgccaactggcagacctggccttctgccggacactgacacctccccaccgcaccccacccgatacaagttctccacccgaatccatcccttaccaaacgaccaccataaacaatcaccgagatcccctggaattttccaagatacacaaaaacacacacgagagagagagcgcgagagcgtgagcgagagagaaacagagagagagtgacagacagacagagagagacagacagacagacagagagagagagagagagagagagagagagagagagacccactcataagtacaaacacacggacacctaaagtataatgaaaaaaaaatcgctacacttatctgaactggtcgttgagttgtgaagagcagggtagaggtcacagggatatggtgatccatacaggtgacccaggtggggcaggtggggcaggtggggccctccagctagagggtttcttccagaccaaagcgcaggcatgggagtgtgaggcggagactcggtgggctcggtgagtgtctgggaagaaagcatgtgccggagcgctgcgctgtgtgtcgggtgtgcgcgagtgggaaaagagtggagttacgggtgaggggtgtgtgttggtgtgcgtgtgctagcaagagaggcaagcggagtggagtagagcagcagaggcgctgttgggtaaaagggagacgaggtgcgacgaccaaggaggctggccagagaaaagcaggcgtctaaagtgcagagaggaagaagagaagagctggcttccctgaccgggaatcgaacccgggccgcggcggtgagagcgccgaatcctaaccactagaccaccagggagcatagtctacaaccgacggtccccgctctcccctgctggacacagacaccctgccagcctctcagccagtctgacatccagactgccggacggacggcccgctcgccagctcgccggctcgcccgctcgtgaccgttgccagccacccgccgcctgcgtctgcgtctgccctgtcagatgccagatgccagatgccagatgccagatgccagaggtccggtgcccggtgccctctgccgcttcgccggcaagtcgggaaccacctccgggactagacgcctgcgcctggctgatctcctccccggtcgccagagcctccaaacggtggtagcgtcttcctttttgtaggcggctggttaggatagcgatgactaggtgggtgggtgggtgggtgagtgggtggttgtgttaggtagtaggtaggtgggtgggatggggggctgagtgagttgtttgtgtaggttaggtagggatagagagcctggggggtagtcgtcgagtgggtagttgtgtaggtaggtaggtaggtaggtaggtaggtaggtaggtaggtaggtaggtaggtcggtctcctggacaaggtaaggtgagaggttccaggctggccaccctcggccctgaaccctggcaaaacatggacaggctgcgttggccgggaatcgaatccgggtcaactgcttggaaggcagctatgctcaccactataccaccaacgctgtgccccaaggacgccacgcacaccacgccggggactgccaccagccagcggccgcgcaccaactaactccctgcagcggctccaccgcggcctcaaccccacagccaacgccagggccaaggcccaggcccaggccaagcacaaccggggctgcgccgctgcgcgcccttctcaccggcgcgtcccgcccgcgcctctcgcacgcacacagccggcacacagcccggccggtggggcgctctcgcctccaaaccgctgccatccggcgcaccgggacggcccgggcacgcttcgagagccccagggaccagggtagcacccgggacggctccgagccgccaggtcaccatccggacccgcctggcacagcgctcaggccacgcgagtggcgctccgccggctccgacgcccgcaacttcctcgggaggacggcgcgttcccaggcatccgtcggagctctgggcaggtggccggcaaggtacccgagggcccgagggcgggagggcatgcctggcagtaggccgcacgagcccggctcttggaggcggtcccgcgggcgcgggcggcagagtgggaccgaggggtcagcgccccccggggccgcccatcgggcaaaaatgtgacagcttgtctccccgtcggggaatcgaaccccggtctcccgcgtgacaggcggggatactcaccactatactaacgaggacgacgacggcgacggcaaccacgacgaccaacccgaagcccgtccttctccgagaccagcctggccaggttcgccagcctccgtccgatccaaacccccaagcctccgccacgcggccacaacgcccctcgcaacaggacccggaccctcaccacggtgtgaccaccgcggcgtcgccggcccgctgcctcctgccccttgtcccctccctggctgctgaggggctgctgagcgggtcagtgggagctgacaccaggctgcgggcctcgccgatggcagcgggagaggctgagcgcgcacgaaccctgggcggccctgcgacgggtggggcgcaggtggcgggagcccgtgcgggaccccgagccacatcggctcctacgagcgtcgggacgtcgtgcgaggcccgcggctcgagcacccagaccagcacacgagaccgtctgccccgtcgcgccaggtcggctatgctcgcgcgagcgcgtgggcgcctggtgccagccagtggagccgcctggcggcccgacccgccgtcaggatggccgagcggtctaaggcgctgcgttcaggtcgcagtctcccctggaggcgtgggttcgaatcccactcctgacaacattgttttgtgttgttgttgtttgtgcgtgtatgtgcgtgtgcgcgtgcgcgcgcgtgtgcgcgtgcgtgcgtgtgtttgtgtgtgtgtgtgtgtgtgtgtgtgtgtgtgtgtgtgtgtgtgtgtgtgtgttttgttttgcaacctccacctggagagaccgcctctctcgcctccttccacaactcctccggcgccgcctctcgcctgactccagtcaaccttccctgacacagcacttctgtgcgcgcaggagcgccctcctctcaacacccaccagctactactggaggggggttctgatggggcgcctggtggtcgtcttgctccgccttgagtccgggagggtgcgggaaggaggcggctggtcctgagcacgctggcaggcggcaaagcccgcccgcccgccgggtgcgagagcctttcggggaaccctcgtccacccacgcgcgactccgcccaccctgatcgcccagccctcgcgtccaccagctctttctcgcccattccgttccctccaaactcgtgcgggagacgcccacggcgcccctgctgtcgggtggggtcgtcgaggcctctgctctgcgcgggtgaccgttccctacgcacacctggcagacgctgggcgcacgcacagacacccggccggccgccgggccgctggctcgcccgcagcggcgggcttgacttggggccctggcgtccgggcgggagaggcgcggctcaccccgcgagctcaccgtcagtgtggacccgggactctggtctccgtgtccctggcgctcccctgccgggtgtatggagccggggcccaggaccttcctgccagggcaagaggagggagctctccggtggtgggaccttcggcggcgagcacgggctgtgacggcggtcgtggggaatggtgttgtccatggcatgggtggttcagtggtagaattctcgcctgccacgcgggaggcccgggttcgattcccggcccatgcagagaccagtcccttttggttctgaggcacgcacgcacactgcaatgtctggctccacatctcctcctgcccaaccctggcgcgggctccagcgccagctgcattcccgtgatccacgggcagcccaccagcctagtctcctctgctccacttgagccagccactccctgcatcagctctgccacagccacccgcgccagttcctcaagtccacttcaaaggacttgacgtactcatcctcccgcaggctctcgcccacaccaagcccccccatgtttcttttaaggcgccccggactccacccacaccccacacccaccgcccagtgctgtctgtccctacacagactggctgtctctctcagagtggacacttggtggacctctcttggccggagcccgagacacggccctagccccagactttgttgtgctccctggcgcaggaacagtccgggtagggacgagggtgcctcctttcccaatcgcatggctctagacccctgagagctgcccggctccggatgggattggacagaggacggatcttcccagtctctcagcacacaaacaggtcgctggtttgtatgttgtctgcgttcatccccaaaacctcattttattcccaataacaccatataaaacagatagaactgtagttgttttattttttctttctgttttctttaatatggtttactcttggggacacgccacccaggacccaagtcaatacaaggagactccttactcagaaatgcgccgccttagcttgccttgtatctagccagctttctttccttaacctaaattgtcccatctcccccgcatttcttttttctttctttctttcttccttcctttctttctttctttctttctttctttctttctttctttctttctttctttgtgtttttctctgtttttgcctctgggcttctccctttcactcttctacttctctttccttcttactgagtggctggctgggtggctaggtgactggcc
